United States Patent Application Publication US 2026/0191916 A1 - sequence listing, part 9

SEQ ID NO: 11 - DNA, 3147275 bp, Longibaculum muris (residues 1,573,639-3,147,275 of 3,147,275)
  source 1..3147275: mol_type = genomic DNA
tggtttacaagtataaggataatatgttaattttgttaacatgcatcctacttttgatcctggaatcttttcatgacagatttttgtagctaaagcacttgctacgaattgatgatgcattgcttggaatatcacttcttggaagtttcttcctgggaatctatcttcgactaatcctcctgttgtatatggatgtctaatcattgagtcaacttcattaaatgttaaccaatatttgaccttattcttatatctttcacagataacttcgacatatcttacaaacatgtcaatgacttctcttgaagcccaaccatcataatttaagacaagattaattggtggttcgtaatgtgacatagtgactaatggttcaatgccatattttaaacattcatcaaaaacatcatcatagaacttcaaaccttcttcattaggttccttatcatccccgttagggaaaatacgagtccatgcgatagacatacgataaaccttaaatcccatttcagcatacatcttgatatcttctttataatgatgatatccatcactggcatgtctttttggatataaagaatcatcagttgatttcaaagcatcttcaatatcttttgttgtgatagaattgtgtgctttataatcttgaacatctacatctaaatgatgtctagcacaatctgaaacactgattcctttacctccttcattccatcctccttcatattggttggcagcagtagctccaccccataaaaaaccttctggaaattttcttaccataattcttcctcctcatctttaagtttattataatcaaaccaaatatccctgcacattattttcaaaagatgaaacaactttacaatattaaacccttccttatttactaattcaacgaatatcgaataaaatctaacggatttctaatagattatataaatctctattttattatttacggataatcagaaatttcatctcatttcactttcaaatcgaggacgatttgcaggaatcggggacgttttgtacttgacatgctattttatttttcaatttcctaaatcaatatattaagattatttttttattcagattcaacggatttctaataaaaaaaaggacctaagtccttaaattaaatgattacttttaagttgttcttcaatgatatgttcatcaataatacaacgacattcccctaattcaatagctggttttgtctttccatgataatcactaccacaagttgtcataatattgtattcttgtcctttttgatagaagtattctactgtttcaggactatgatagttgctaaagcattcaacaccatcataaccaagtttcatcatatcatcaaacacttcaaattgaccttttaaattgttaccaggatgtgctaagacagcttttcccccatgtttatgaattaattcaattgtttcttttaatgatggatatttaatttctgtataacatggtttcccttgagcataaaaatcccaatagaaattaacaaaaggattatcactacgacttccaccttcacgatatggttttaatagttcatgatctttatattcttctttgcctaacaaaacttctccaaacatttcacctgtataaactccattatctgacaatgcatctaaatcttcttttgttaattggaatcctaaagcatttgttaattctaatttctttaatgaacatgctaattcttgatttaaaacattatcttcaagttttacaaaatcttcatcatgataatcaataccatatcctaaaacatgtaaattaatgccttcataagtacaatcaatttctactgctggaatatataatattcccttttctttagctacactttttgcttcatcaatagcttttacactattatgatctgcaattgccataatacgtattccggcatcataacatttttctactaattgtgttggggtaaattccccatcatcactataaagtgaatgcatgtgtaaatcaataaatttttccattgtttcttcctcctcttaaaaattcatgacctaattctaataatcccaaattcatatattttagaatatcttcaacaacaacaatatgaggtaacacttcttttgataacattgttttttgtagattttcctcaatcttttgactttcttttatccacggacaactaataacaattgtttctggatcaacagtgactagtaatgtcaaaataaatattgttaataattgcaatgttccttcctttgtttttaagtattcaaattgttgttgttttgataatcctggtaaaaatgaaagctctccagccatcccatgatgtccactatgaatatgtccaccttgtaaaatacctactccagataattccttaagaggttgataaatcatagctaaatctttatattcttgatgtttagaataatatcccttagtagcaatattaacatcattatcaataataactggaacatgaaattgagcttgtatttcttgttgtatttgacgattttttaaatcttctaatcctcttaccaagaaagattcatctaaatagccttgttcatttaatatagctgggatagctatcataatgacttgtatattttgatatttttcaaacatactatgtatgttatttaataattcttgaaagtttaatttctttggttgtgatttcttttcttccaataaatgattttgataatcataaaccttcataatatcataaatatcatcatattctctaaagaacgaaattgtaagtaactgacaataatcaggatttaattcataacacttggcttttcttccacctgttgatgcaaatttactattcataacaacttctttagattctataagctcttgtaaaatattatgacaagtccctgaacttaaagaagtcagttcaacaatttgacttttttgacattgccctaattcatataatacttttaataccttttctttatttgttttccttaaattttgaattgatttttgcatcagttcaccaactttcatcaactattgacgaaagaattataacctattttaatgcttatgaatagttgttttcacattatgaaaaaaataatgaaaatttcttgactttcctacccttttaaaacatactttgtatatgtaagaaaggatgtgagattatggataaaggcaagcccaaaccgaatcattatgatctcacattagtgagatcttcttaaaaaggaggtcaatcatggaaaataaaacacaaattcaattagaaaaattattacaagctctagttaaacatgatactaaggaaattgatgatatttatgaacatgtacaaacaattgacttagcgcaagagattgaagaattagaggataatcagttagaatatttatgtaatcatattgatgatgaaaaactagctgaaattttagaagaatctgatgaagaattacaagctgatattattgattgtttgcataatcaacgtattttaagattatttaattttattcctaaagatactattgttgatattttaggagaattacctattgggaaacgtaaacaattaataacattaatgaaagctgatgatcaaagagtcattgaacaattattaggctatgaagatgatagtgctggtggtttaatgacaaccgagtatattgctttaaatgcccaattaacagttgtcaatgcattaatgaaaattaaagagattggtcctaagactgaagttattgaaacaatttttgttttaaatcataaaaaacaattgattgggacagcagacttaagagatatcttggtttctgaagaaaatacaactttagaagatattatggatgatcaagtgatttatgtttatcctgaaactgaccaggaagaagtttctttgttagtgtctaaatatgacttaacaactattccggttgtcagtaagacgaaagctatgttaggaattatcactgttgatgatatcattgacgttattcaagaagaacatactgaagatatgttacaaatgcatggtgtaagtaaagaagaatcattagactcaactttatttgaatcaattaaaatgcgtttaccttggctcattgttaatcttgtaaccgcatttttagcatcatttactgttaaaatgtttgaaagtaccattgaacaaatagttgcattgtctgctactatgacaattgtaaccggaatgggtgggaatgctggtagtcaaactttatctattatgattagaagtattgccttaggtgaggttcattttaaagattgtttgcctgcgcttattaaagaaatatttttaggtgtgattaatggttttgtaactggagctattactggtgttattgtttatattttatatggtaatttctatttaggtattattatatgtattgcaatggttggaaatttagtggtttctggattctttggtttcttgattcctgttgctttaaaagctgttcatgctgatccagcacttgcttcatcaatctttttaacaactgcaactgatgttttaggtttctttatatttctagaactggcaaatatctttttacccgttttactataaatcaaaagcgacatgacgtcgctttttttagaaatttaaattagtgtggggtcaacccttcggtctacaattccgtggggtgtccctttttttatctctaaattttaaaggggtctccttcatattaaaaaaatcctttcatgatatgatatttttgcagaaacaaccatatatgaaaggaaagttttaactcatggattatgatactataaatttacttggtttacaacctgatgatattcaagatttaaacattgcaagaactgataatactgtttttattaatgtcactttatccagaaaaattaagccttgtccctgctgtggcagcttaaatgcaaatatcaaggattacaagattaaaaaaatcactcattctattttcaacacaaataacacctatatcaattacagatgcagaagatttatatgcaatgattgtcataagtcttttcttgaagataatcctttcattgctgctagacaaagaatttccaacgctacaattatacaggttctcaaggactgtaagagattgaattatacctttacttctattggtgaaaaaaatcatatctctacttcttctgttgtcaatatttttgatcaatatgtcaccatgcgtcctaacccacttcctagagttctttcaattgatgaattttatctaggcagaacctgggataataaatttgcttgtatcttcattgattgggaaacaagtcagattatcgatatatttccaagcaggaaaaaattcaagctctattcttatatgcagtacatcaataaaagtgaattcaataatgttaaatatgtaagcattgatatgaacacaacctacagagattttgcctatcatcattttaagaactgtattgtcatggtcgattcatttcatgtcgtaaaaaatattaacgatgcattaaagaatgtacgaattcatgttatgtccaagcaagatagggacagcgttaattattatttgctgaaacattggaatcaccttctcatgaaacgaaaaggagacattgaagataatattcctcaatacaataagaaaatcggctatgccataaacaagcctcaaatacttgaattgatgctcaagattgatccattattaaaaaatgcatatgaatggaaagaagactatcttgacttcaaccaagactatacatataaaaatgcagctaagagatatgatgaattatataatgaattagtcaagttgaatatgaatgagtttaaggatgttgttggatttttaaaaaactggagaactgaaattttgaattctttcattcttattggtcaaagaagaatatcaaatggtccaatagaatcaattaacggaagaataaaagttcttttgaaaacatcattaaaatataagaactttgaaagattaagaagccgtataatgtactgcataaataaagattccttacctctattgacaaataaaaagaagacaaatagagagcctggaaaagaaagaggaaattataagaaaaataaagaataatcgttagaaacggttgtttctgcataataaaagtatcattcttaaccccatggttttgaatgatactttattcactttaaacacatgtggggtcaataaaaccccacgttatttttgagtctcgtttttacaaaccccgcggaaatttagagaccccttttttttataattctttatcatatccttctaaaatagcaaatgaactacttgttccaattctttgagcaccagcttcaatcattttcttgcataattgccaatccctaataccaccagcagccttcacttttacactatcccctactacacttttcataagtttcacatcttctaccatcgctccactaataccaaagcctgtacttgtcttaatataatcaggtcgaacttccttagcaatcatagctaattgacgaatttcatctttttctaaataacaattttcaaagataaccttagaaataacattgttttctttacagatagatacaatactttccatttcttttttaatataatcccaatcatgcattctagcttttccaatattaataacataatcaatttcatcagcaccatcttcaattgcttgctttgtttccgctaacttaatatctaaagttgtttgtcctaatggaaatgaaatagctgcacccacatgaatatcagttccttctaattgttgtttacaaaactttacagcaacactattaattgctaccattgctgctcctaattcttttgcttcatcacataatttaataaaatcttcttttgttgcatatggttttaataaagtatgatcaaacatttttgcaagttcttttcttgttatcattttatatctcctttacatgcctgtatttatattatctattttacataatttttatcatatttaaaagtgattaacactaaacatgaaaactttttaagaatcaataatttaatcattttatagaattatgctttatttttaagaattgattcgttatcatatacttataagattatcattattttttatctaaaggaggaatgaagatatggataaagaaaaaatgcaacctacaatgttaacatacatcaaagaaaccccagctcaattagcttataataatgagcattctaaagaaattacaaaacagcttgttgatttatatttaaagaaagattatcaaactatttggattattgcttgtggttctagttttaatggtgcccaatgtgcaaaaccatttatcatgaaatatttaaattgtgatgtaaaaattgttccacctaatagttttgtttatcatgatcatcatttaaatgaaaatgatcttgcttttgtggtttcacaaagtggatgttcaacaaattcaattgaagctttaaagaaacttaaagaattgggacatttagctattggattaacaggtaatatcaattctgattttaaggattggagtgatttgcttattgattatagtgttggtaaagaaacggttggttatgtgacaaaaggggtagctacccttgctcaatttttaatgttatttgctttagaagcagctttagctaaacaaaagatttctatcgaggattatgaaaaagtcatgaaggaattacatgaagttcctactcgtcatgaaatcattcaaaaagaaacttttgatttttatcagcgtaataaagctgcactcacatcaatgagtgtttcttatacttgtggttttattcaaggatatggtatcgcttgtgagggggcccttaaaattggtgagactgtccaagttcctagttttgcctatgaagctgaggaatttattcatggacctaatctacaactcactcctaactatacgctttatttcattgatgactttgcttgtggtagtgaaaggttgctgcagatttatcaggctgctcatagtgtaagtgaaagagtattcgccataacaaatagtccaattgttgatgatcaacacgctattcgtttaccttttgatatccaagaacctcttttaacacctttatatgtacttccatttttccaaatcattgcttatcaagtgacatcagatttaaacaaatggaataaacatccaatgtttgctgattttaaaaaatatgctgactctaaaactaagacaattaaaagtattatggttgattaaaatacaaaaagtgatatgttgactatttaaaatttcacgtggtttgaattgactacgcattattgcgtggtctttttctattcctttaaattcttgctttaaatatttatggggtatctgtaagttcttgaattattatgatattgtatagataagactatttagaaagaaaaaagatagtaacctcaccgaccaaagttagtttaccatctgctttctcatctcttggattataatctatttcaactattctatgtactcattgttttaaacaagtagaatttatgtaaatgaatcaatacaaacttacttaatcatacgcataaagttcaccagttgcattagtctttttatcaataacacctgtaacttgtaactcatatcttcttagattagaagcattatacgaatgatatgtttctgtatctccaataccaacactcattgttttttgaacatagccagagactatgcaccttccataactaccacagttcgtccctgtggtagttacttcaaagcgtccagttttatatgggttacttgtttcacctgtactagctttactcatacccccacttagtgtacaacgtaatctagatgtggctgcacttacattgacaattgtaaatgcacatataactgcaattacacatgcaaataatttttctttctttttttcatcctcttttcttaattatttagttttttttcattacttctaccaataattaaacaactaaccaaaacaacagtccattttagatagtaatcaactccaattaaatttacaccatttgtcataataaataaagataaggggttttcgatattagtaaaaataagaatataacaaatcattattccaaaactcacaatagacatttttgaaacaactaaggtagaatagaatatacttgttaaaacaactgattgaaacatgagtacaagaataatatcaatcatataaacattatttattgaaatatagatataaattggtaaagttattatatgaaataatatgcacactagataaagaaagtaccattttggcctatggtttaaaatacaatttaattctctcatattcgattgaatagttttttgggacatgaaatattctaaaataatcataataacaaataatattttttgtaacatttcaaatatacttgacttcaaatcataatttaaatatacaaagtccataatcttatatataaaaaatggaaaaactaaaaaataaagaatacctagaattacaatatatacccacttgtccttttttaaattaaaagatataagttctatgtcttttttcatgagtttaaataaacatatgcatcatctaatgtgggttcttctttagtaagaaaatcatattttaggacagtctttgaaactattctaaaaatattattctgattaaacactacatatatttcctctttaatattatcaatatttgaagaatgacaagaataaactttattatccaataattgtaataaatcattaactaatccactataaattaatttcccatcttttaaaaataaaatatatgaacattgtttataaatatcgtcaacaatatgcgtagaaatgataattggaatatcaaaatctaattgattaataatctctctaaactttaaacgttcttgtggatctaatcctgcagttggttcatcaaaaacgagtatatccggttcccccattagtgcttgagcaattccaagtcttctaatcatcccaccagaaagttctttacattttttatctctatcatttgataaatgtgttagctttaaaaccttatctatttctttatttctatcttgcttgggaatctctttaagaatcgcaaaatatttcatttgttcatataaagttaaatctttaaaagcatcaaatgattgaggaagatatccaatattaaatttcatattatcactaatacattcatcatcaactaaatactgaatacttccactcgtcactttatagatccctaaaatcattctaatcaaagttgttttcccactaccattcgctcccatcaatccataaatatgattgctaattttacagttaaaattccttataatttctttcttatttaaagtaatacaagcattttccactatcacctccattattccatctccatttctttagcgatttttttcatataccgttctactcccaattcatttaagtctttatcaaactgttttttaaattctacaacttggcgatatctctcttttaaattttcatcaacattttcctcattataaggccttgttatatattcagaaagaaaatcatttacttgttttataaattcttcatctgaacactgtataaaactttccaatataagcatatctcttaaaacagaattgatatgatcattttgtgttaaataataagagagatattcatcggtagaaatatatccatgattacttactaagatataattatcaaattcacaataaccacctaaattagtaacttgaattaaagacatagggaaaataataataggtttgctttttaacgatacttgttctttatcaaaaagattactcatatattcagtaagttgttccttatgttcatagatatctttaatataatcattataagaattattttgtaaacttagtggataataattcttaaattgagaatcaattgttttttttatatttcctccaataagtgtaaaactatcactttctccaacataatgtgattcactcttctgactaagattagtaattattggatataatgtatcaatttcaacatcaaattttgcattaactctgttataaggattaaacccaatgaaacttgtacaaggattttgaatctttacaaagatttgtttttttccttccataggataccatgggaaatagccagggagctgtgttgcctgatggttggaataaagtcttgggtgatatccagtataagtaatttttaatttcaattgatcaattggattagctaaacttaaataaatgtaatcaccctcctgggtaaattctattttttgattactcgttaaagtcttaatatgatagccatggtaaagtgttaagacatagtcacttcttttatgttcagaactgattaaaatttctccactagcttccaattgtcttcttatttttactttaagttgatagttagatatatgataatcgatctgattctcttttatatatatatttttaccttgagaaatttgataataattcatatcattatatgaatatctccatgaatcatccgcacgatacatactttgtgggatattaacagcaactaatgataaacatattaatactatttgtaatcctttttttatatgagatagtttactcttatatgcaatataaactgcaactaatatccaaaatatgaatatatatattttaaatacctcattttgaaatccatatagttcatctacagcataaactccatactggtaaaaataagaaaatggtctaattataatttgtatgaagttatctaatagatcaatagtttgtggtttatttattgatgtaaaaagatttataaatggactcgataaaaaaatggtaactactaaaaaaggtagtgcaactttaaaacttcttatcctagatattaggccgataataagagtaaaacatatttgtggcaaaaggatgttcattaagtagtaatttgctataaaattcattaacaaagcatattcattagtaataattgaagcaataaacattcctactatgattactatattataaatgataaatagaatacaaataattaaaacataatagaaataccatccctttttaacatgtatacaatttaacacttcatcgactttttcattccttgccatagtcaaatatacatacgttatactaataaacattaagttaatataaaatatattttttacaaatgtatcaaacatatatagaccatttaatgagatttgtaagtaaatagggaaaacaagacaaataaaacacagtaataaatatatatatttcagtattttattagcaaagaacaattctagatgtaagtttattttttctatcatatttcatcagtacctttctgagagacggtatatcataattcggttctatattaggatgcttataaattcaatacaaaataatatattatctttgaattattgaattgatatagaatacaattcatttaagatctttttaaatgatgcttatttatacccagttaaatacaatatcttgttctaagtgagttctttttatgtaatattaaattcttattttactattaaaccatagaaaaatgattgatccaatatttttagatcttaaacaaacaatttgtgaacaacaactactaaatttttttcattttctttaaaacttctggttcttttccgtggtatgaaccagatctagaagctccactaatcgctcttgccgtcataaacacagacaacagtgagataaatcttaatagtttaactttcatggtttctgatacaagcaataacaagtatactgactattaaaataacatatgtaagaatatttgcataatgacttatataagagaatgttataattcctatgagaatgatgagtgatagaattttatattttctaattttctatttcttactggactgaatattataaatacaagtattgcaaatatttgaatatataacatgtaagactggaaaaacaacatcctgttgtttaagtaatccataaatatcttgaatgggttccgaattgtctaaccatgtctcttttgcaagatcttcttggttttgatcgagaagataccagtttccttaaaggtggtaatcctagaacgggaatatccacctttataacttattcaattgtttggggtgttacttaccccacgataatctagacccccaacaactggagagcatacgttattctagattaccgatatgttttgtcatatcacttttttatgtggtctacaatatgcacaataaatctttttattatcttcttctccataataggtaatatactcattcatcataaaaacttctccatccttactcacacaaggataattaatatttgtataatctccccattcttcataatttaagaagaattgtctgattctctttctatcaaattcaagaataagttctattcctttaccattatgcacaatttcttcaaattctttctttgtataacgatacataaaatctaatccataatttaagacacggctagtaagtccatcttcagtaataatatattcaacaatattacctggaactgtatctaaaacaatctgtatctctctttctctttgcatttgttttgtataatcactaactgctccatagaatacacgtttattgtgctccttatgcaagaagaaagcattcaaatgcatccacatcatttcaccacttaatcgatatcttctaaatgttccactagcacctaaatgccctgctttttctgcacgattaaaaatatctaaaacaagtgcttgatcatctttatgaacctgattgataatcactgaacatttttgttttaaatcaactgaattacaacccgtaatattataatatccatcattaactgtcttaataacaatattattattttcatcaacttcgtaaattgcaattccacctaaaatattattaagcattgattcacttgtcacatctttatgaaataaatcctccacctgtaaaacaggtaaattatcaaccatgacatctcttgtatcaacaagttcatgatttacaagtaattcatcaaaatgtttagcagacattggacgatagaaataaaagccctgcatgaattcacaattcatattcaaaagatgtttcacttgttcttccgtttctacgccttcagcaatgagtcccatctttagccacttagccattaagattgaagattccaaaacacttaatcccttatttaaacttgtttcatccatatcaagaaacttcatatctaatttcaaagtatcgacttcaatatcttttagcatatttaatgctgaataaccactaccaaaatcatccattaagattctaaatcctgatcctcttaattgtgatattgtttcaaccaattgaacaaagttttcactataagcactctcagtaatttcaatttctaaatatttttttggaacttgatattttttacataaatcattaaaaacttttactagattatattgataaatatctaatcttgatacattgactgaaagaggaacaataatttcatgattcatcattctttgatgaatatatccacatgttttttcccatacataataatctaacttatatataaatccactactctctaaaataggaataaatgaattaggcattaatagtccttgggtaggatgattccatctcacaagaaattctgcacctataatttttcttgttctggcactacattgaggttgaaaataaatctcaaattcattattttctaatccttttttaactccaaataaaatttcttgttcattttctaatttcagtttcatagtttctttataaacagaaacacgatttaaaaaattccctttaactgaattcgctgccataattgttcgatcacacattaatgtaactggaagttttcgatcacttatttgatatatccctgcagctggcaagaatttatattcaatattataattttgaatacaattcactaattcattttcgacattttccttatggcaatatttgtaaggtaaaaagcatataaaatcatcattaccaatacgtgatgcatagccatcttttccactcatataattttgaatacaatttgctacatattttaataaacgatctccttcttcagttccataccattcattaaataatttaaaatgttcaatatcaatagaaatcattccatatgatgttttcttatctttttgtaatctttctttaacgagtttattaaatgtatcttgattataaagataagttaaagtatcaacttgtgcggcataattattatcaaaatgcattttattaccatgatatctatcatcaacattgactgcataacataaataacaaatattatctttactcttttcaactggttgcaaataaagtgaaaaataatgatattcgctatctgatcttaatactcgaaaatcttcaacaacatgtcccatattttctgttcgataagcgagtgtattaatatcaaaaaaagctttaaaatttaaagtatcatcaggataaacatattttaaactgaaattattaattaaagattctattgttccttcttctggtaaatctatttcatcatgattgacataaagataatgatatcttttggtatttaaatcaagttcaagcaattcatcataatgttgattttgattgatatttaaaaagacttttcgattttcatcattaataggatgaactgctactaaaatacaatcaccttcatttggccattttaattttaagattgtataattattccaaacttgatcatttttattataacgtagaaaatgaaaaatcgacgtatcattttcttcaagttgttttaaaggacaatctaaacaaggttggcattcatgagataatagctcataacataaggcattatcttgaaaatgagggtatttttctttaaatgcatcatcaatataaacgatttgatacttttcattaacaacataaacgctatttaattctttattatttttctctctcattataacaccttctgttttctaaattatctgttcatatatatgataacatttatatttcaaataacaaagaaaaaaggtctttttaaaatatttacttgaatccaattaaaaaaaaagcttgaaaaaaagaggagatttaactctcctcgttcactacatccaatccgttccatcttctctttttaaaatataacgaatcatctcaaatatttcttcttgtgtgcgtgctttaacaataaagacatgatttcccattgctgcagctaaagcttcaggaacatcagtttctaaggctacctgattgccatatttttctcttatttgatcatagttatgcatataccaaataccatcacgtctaccagtatatgctacccaatattgacgtttaatatcatagaaacatttattatatttcaccatatctgcccaaatagtataaacatcaacattatatgcaaaattcatcatatctggcatataagctcctggagcacgcatattgacttctaaaccaacaatatctccctttttccctaatccttctttatcttcatctaatctaaagaattcaaaatggaagaaacggcttcgcgtatcaaaagcctctacagcttttttaccaatatcgtataaatctaatccttctactggttgtgaataaaatgctgtatcgcttgcttcattgacattatccataatagaattaagcataacatgacttgttgcaattaagatgtttttatctttatcagtaataccatcaaatgtttcaacatgtcctggtaccatttcttcaataataaaatgaatatgtgaatcttttgttgcaaagaaataatcaagttcatcatcatttgatagcttatatgttgaagttgctccaacaccattatcaggtttaacaatcactggatatcctactctatttgcaaaagccttagttgctaggtaatcatcaacttgacgatatcgtgctgttggaataccagctgctttataaacatctttcatttttgatttgtatttcataggtgcaagatgttgaatcttaggtcctgttgtgacattaaattcattacgtaaagttgcttctaattctaaccaatattcgttttgtgattcaatccaatcaatatgtccataatgccaagtaaaataagcacatgcacgataaatactttcataatcttctaaatcatcaacacgataatattctgttaatgcattttttgtatgttcaggtaattcttcataacttgtatctccaattcctaaaacattgacttcacgtttttttaaacgatcacagaaattatagaaatataaaggaaaatgaggtgaaataaaaactaaattcatactatatcatcctctctataaaatatgggaattgcacttgccaccagttccaatcatgattaacatcataaccccaaaaatcaatccatgctggaatatccttataatctaatagttctttcattcttgttgtacttctaatcatatcatcttcccatgcaccttgcccacaacataaaacaatttgacaatgacgatacatttctacataaggatgatcataactcattccttgtaaatattgaattggtgaattgcgatataaaatatcatcatgataatcaccaaagaataaatcactatcataatatccacttaaagcaattgttccactaaaaatatcaggacgtctaaacataaaattcacagcatgtgttgcgcccattgaacaaccagttgtaataattccatcatgattatatccattatttccctgtgcattgatttcaaaaattctaggaaccaattcattgacaatataataataccattgttccatcataaatgttctatatccattatccaatccttcaccagaccaagactcaggatcaatactatcacaacaaaataattgaatttgtccattattaatataatgttctacagtattgaccatcccaaagttttcaaaatcaaagaaacgtccattttgtgcaggaaaaaccaaaataggtcttcccgcatgtccataaaccttaaattccatatctctatctaaacaatgactatactctttaaaccattctatcttcatatcaattcctccctctatcccaaaacataatcaacaaatgcattcacttcatccattgtttcaaaacgtgctgtatatgtaaagttacccattgctccactcaatatatctggcattctttcacacatcactaaatcaaactgatattttgtcgcaatttcattatgggtatgtttataaagcacatgatctctacgtccacaataaacacagtgataaggtctatgatgatcatattcactatatcccttagttaccatatctgcataaattgaataaacatctatttcattagcataattcatcatatctggagtataacctccaggtgttcttaaattaacctctaaccctacaatatctccttttttccctaaacctttcttatcctctaatagtctaaaaaattccatatggaaacatcttccagctgtataaaaggctttaacacaagcttgtcctgcttgctttaaatcataaggtaattcttttaatgaataataatacatactgcttgcatcattaactacatccataattggattaggaaaaacatgtgaagtttcaaataatatatctttatctagattagcaattccatcataagaaataattaaaccattcacaaattcttccataatatattgagtaggatgttcttctaaataaaaagcctctagttcttcttgattagaaattttataagtctttgctgcccctactccattatcaggtttcacaacaacaggataaccaacttccttaataaatgccaaaccttcttttaagttagtcactaaatgatatctagctgtcttaactcctgcttcttcataaaatttcttcatctttgatttacatttaatatcttcaatgtggtttgtatgaatacctgttgtaatattaaaatctgttcttaaacgtgcatcttgttctaaccaatattcattgtttgattctagccaatcaatatgaccatagttaaaaataaaatatcccattgctcttaccatctcatcataattttccatattataaacttgatagtaatcatcaattgaattctttaattcatctgttaattgatcgtatggtgtatccccaattgccagcactgttacacctctttcttttaatcgatcacaaaaattataaaaatttttgggaaatgctggcgatatatatacaaagttcataattcttcccctttctttttttctattataacatagatagttcttttgtaagtcaaaatttttaataattttttctaaattttaaacaaaaaagatagtcatttcgactatccctaatttttgcatctatttccgtgtttaaaaattccatatatcatcaaagcaatcgcaaaacaataccccatcaaacgtgcccaatcaggaatcatttgagcttctcttaaaaaataaaatgttgtactgattaacatcccaatcgcaatataataattaggttgttttcgatttctacacatagtactaacctccttaatattttttagaataataaatcttaaaaatcaatgttatgaataaaataccataaatgacacatatcaatgtctttgtcacaagcatattcatataagcactcacacaagttattatagctaaagataaaacaatcgttattaatgaagattgtccgactttttgcttaatcatcatttttctttcatcatgttcttctatataaagtttttttaacatttgttcatctttaagtgcttttgaatatttgtaaattcctaataatcctaagaaaagtattcctatacaaattcctagttgaaaactgataccaatttcataagttttttcaaatggtattacataaaacataatacttaaaataatacataccaaaatagatccttttaaaataagatttcttttttgaataattctcttaaattcttccattattgaatcccctccacatctgaaaaatcaaaaacatcctcaatactcaaatcaaaatattttgctattttatatgctaatactaatgaagcaacatatttttctttttctaaagaaatgatagtctgtctagttactcctactgctaaagctaattcatcttgcgatattttattggcttttcttaactcttttatctttgttttcatctcatcacttcctaccaatagtatagtacgctttacatattttgtaaagcttattttacattttaaataaatataatgaaaactattttctttttttgaaagtcaaagcgttttcaaaaagtttcatatataataagaaaatgtgggaggatgaattatgaaagataaaaatattattaagtttcaagccttctactttttactaattggagcagttggttgttttacaccttatattaatgtctatttagaaaaaagtattggtttagagggctcacaaattggtttaattactgccatatcgcttattctaggggtttgtgttattcctatttggggtgttattggagataaaacaagaaaatataatctcttgttaatgacttctttagctctcagtattgttgttttgtatttttattctaaacaaactgtttatctaggatgtattgtatttgccttattattagaagttgttagattaggatcgacaccaatggcagatacgattacgatgaactatactgcaaaaaatggtggtaactatggttctattcgtggaatgggatcacttggttatatgttaggtagtatggctgttggcttcttagcagatatctttggcttagatggacctttatttacaagttacatgttattgcttggaattgctttattaatttgctttacttttcctaagtcaaatgaagaagatgatgagaaagaaaaacctcaaaaaggtagttttaaagaattattagttaataaaaatttcatttttattctagtacttgttatgattactcagattgttgtagatagttctggagcatatgctggaaaccatcttgttgttacattaaaaggaaataattcacttattagctggttaactttggtacaggtattacctgaatttttattcttaatggttgcatcacaaattattcgtaaaatgggatataagaaattctttttaatctcaactattccaatggctattcgtatgtttacatatgcatttattccaaatccttatgttttcgtttttataagtattgttcattgtcttggtgttgcttgttcaacagttgcgagtcttgcatatattcaagatacagtgagtcctgcagtttttggaacagctattactttattaaatgctgcaatgagtattggtaaagcaatttatggttatttatttggtgctatttatcaatattttggttcttataatatttttcttattagtggtattatagttgtaatcggagttatccttgttgcaacaacaaagcgttttgacgaagcagatcataaattaaaaaatacaaatgcttaagccttctagttatctctagaaggcttttttaggctcatataaaagaaaaagagtagagagatatataaaatatcctttcttctcttatgtgcagcaggcgggaggacaaggcagatttctatgataatcagattaaataccttatgaattcacaaaatgagaatagtttcatttttttatacaaaaaaagagagatatcggatgatatccctcaggagaactggcagcttgctattgtcgcaatcgctcactatcttcgccgttatgatgcttaacttctgtgttcggcatgggtacaggtgtttccatcatgctatcgccaccagatctcttgcgagcacgaacgctcaaaactgaacagtaactagcttctctctccttgaactaccttcttaggttaagccctcgacctattagtatcagtcagctcagcatgtcgccatgcttacacccctgacctatcaacctcttcgtcttagaggggtcttactttccttcgaaatgggaagtctcatcttggagggggcttcacgcttagatgccttcagcgtttatcccttccagacttagctacccagctgtgccactggcgtgacaactggtgcaccattggtctgtccaccccggtcctctcgtactgagggcagctctcctcaaacttcctacgcccacgacagatagggaccgaactgtctcacgacgttctgaacccagctcgcgtaccgctttaatgggcgaacagcccaacccttggaaccgacttcagctccaggatgcgatgagccgacatcgaggtgccaaacctccccgtcgatgtgaactcttgggggagatcagcctgttatccccagggtagcttttatccgttgagcgacggcccttccattcggcaccgccggatcactaagcccgactttcgtccctgctcgacctgtatgtctcgcagtcaaacacccttctgcctttgcactctgcgcatgatttccaaccatgctgagggtatctttgggcgcctccgttactctttaggaggcgaccgccccagtcaaactgcccacctgacactgtcccgtcatcggcttcacgacgtccggttagaacttcaatgcatcaagggtagtatcccaacgtcgactcctcgaatactggcgtatccgtctcccagtctcctacctatcctgtacatcatgcatcaaaatccaatatcaagctacagtaaagctccatggggtctttccgtctagtcgcgggtaacctgcatcttcacaggtactaagacttcaccgagtctacagctgagacagcgcccaaatcgttacgcctttcgtgcgggtcagaacttacctgacaaggaatttcgctaccttaggaccgttatagttacggccgccgtttactggggcttcaattcatggcttcgccttaagactgaccactcctcttaaccttccagcaccgggcaggcgtcaccccctatacttcgacttgcgtcttggcagagagctgtgtttttggtaaacagtcgcttgggccgttttactgcggctcagctttcactgagcactccttctcccgaagttacggagtcattttgcagagttccttagctatagttctctcgctcaccttaggattctctcctcacccatgtgtgtccattttcggtacgggctgacttgaggtatcgctagaagcttttcttggaagatggcttcggcgacttctgtacttatcgtaatgttccatacgcttcacgccttcgggttatgacatccggatttgcctggatgtcccctacctcgcttgcaccagctattccagcagctggatcgcctagccttctccgtcactccatcgccctcacgccaggtacgggaatatccacccgttgtccatcgactacgcctctcggcctcgccttaggtcccgacttacccagagcggacgaaccttcctctggaaaccttgggtcttcggtgcgtgggattctcacccacgtgccgctactcacaccggcattctctcttccagccgctccacatgtccttacgatcatgcttcctcgctgactggaacgctcccctaccacttatattctctataaatccatagcttcggtattatgcttagccccggtaaattttcggcgcagagtcattcgaccagtgagctgttacgcactctttaaagggtggctgcttctgagccaacctcctggttgtctggacatctccacatccttttccacttagcatatattttgggaccttagctgatggtctgggctgtttccctcttgactacggaccttatcacccgcagtctgactgccgcgcatgtcctcgtgacattcggagtttgattatgctcagtacctcgggatgaggccatcacatattcagtgctctaccttcacgtgacttcgcgcgacgctagccctaaagctatttcggggagaaccagctatctccgggttcgtttggaatttcacccctagccacaattcatccgccaacgtttcaacgggggtcggttcggtcctccatcgggttttaccccaacttcaacctgatcatggctagatcacccggtttcgggtctatgacatgcaactgtcgccctattaagactcgctttcgcttcggctccgcgtctcccgcttaacctcgctccatatcataactcgccggctcattctacaaaaggcacgccatcaccctttaacgggctctgacttcttgtaagcatatggtttcaggttctctttcactcccctcccggggttcttttcacctttccctcacggtactggttcgctatcggtcactaaggagtatttagcctttcgagatggtcctcgataattccgtcaggatttcacgtgccccgacgtactcaggtactgcctcgcctctctccacgatttcggatacgggagtgtcaccctcttcgctgcgccttcccctgcgcttctcctatcatgtcaagtcgactttattggcagccctataaccccatctttacgatggtttgggctcctccgctttcgctcgccgctactcacggaatcgttcttactttcttctcctgcaggtactgagatgtttcagttccctgcgtctcgcctcgtctgactatttattcatcagacgatatcatccctctcggaatgatgggttcccccattcggacatcgacgggtcgttgcctgcttactgctcgccgtcgcgtttcgccgttcgctgcgtccttcttcgcctcttagtgcctaggcatccgccatacgctctttcttgcttagcctaaagtgttcaagttctatacttttttctcgttttttcttagttttttgcaactagatgaattgaccttcaatcactcctgatctcgtttcttcttcatctatcttcttcttgtaaaaagtttttgctagtttgctattcagttttcaatgttcctacttctctcgaatgtcctctcagacattcaaaactaaacagaattccacgcttcttctccttagaaaggaggtgatccatccccacgttcccgtagggataccttgttacgacttcaccccaatcatcagtcccaccttagacagctccttccttgcggttaggccaccggcttcgggtgttaccaactctcatggtgtgacgggcggtgtgtacaaggcccgagaacgtattcaccgcgacatgctgattcgcgattactagcgattccaacttcgtgcagtcgagttgcagactgcagtccgaactgagaacgggtttctgggtttcgctccacctcgcggcttcgcttccctctgatccgtccattgtagcacgtgtgtagcccaggtcataaggggcatgatgatttgacgtcatccccgccttcctcctccttgcagaggcagtctcgccagagtccccaacttaatgctggcaactggcaacaggggttgcgctcgttgcgggacttaacccaacatctcacgacacgagctgacgacaaccatgcaccacctgtatcccctatagctatctctctatctctagagcctttaagggtatgtcaagacctggtaaggttcttcgcgttgcttcgaattaaaccacatgctccaccgcttgtgcgggcccccgtcaattcctttgagtttcattcttgcgaacgtactactcaggcggagtacttattgcgttaactgcagcactgaggtctgacccccaacacttagtactcatcgtttacggcgtggactactagggtatctaatcctatttgctccccacgctttcgggactgagcgtcagttgcagcccagatcgtcgccttcgccactggtgttcctccatatatctacgcatttcaccgctacacatggaattccacgatcctctactgcactctagctcctcggtttccacggcttaccgaagtttagcttcggtcttttaccgcagaccctagttgccgcctgctccctctttacgcccaatgattccggataacgctcgccacctacgtattaccgcggctgctggcacgtagttagccgtggctttctcataaagtaccgtcactcgcatgtcattccctacatgcgccgttcttcctttataacagaggtttacataccgaaatacttcctccctcacgcggcgttgctcggtcaggctttcgcccattgccgaaaattccctactgctgcctcccgtaggagtctgggccgtgtctcagtcccagtgtggccgtccaccctctcaggtcggctacgcatcgtcgccttggtgggccgttaccctcaccaactagctaatgcgccataagtccatcctctcgctatcccataggatatttaacataactctcatgcgagaattatgcctatgcggtcttagctatcgtttccaatagttatccccctcgaaaggccaggttacttatgtattactcacccgttcgccactcaccaccgaagcggtgcgttcgacttgcatgtattaggcacgccgccagcgttcatcctgagccaggatcaaactctccattgtctatctctaaagacaacttctgtcttctagctcttctttgtttcttcttattgacgtgttttctgtttagttttcaatgtccgtttgctgccctcttgccgagtgctcatctataataccatctcatccctccctttgcaagtcttttttttactttttttaaaaaaatttaataatccttttttcattatttgtttaatgttttattttgtttgattatatcaataaaatttgaaattcatcaaaaaaagtctattcaatttgaataaacttttctaataaaaaatcaataaacattatcataataaccaaccaaatggtccaagcaaaaacactaaccatatcaaattggatccttgcaaaattaatagctcgaccaactccataaggcagtcctgctaatatttcagccatgacagttacttttacacctaaacttaacgaactctttaagccagatagaacacttggttgaattaagggtaaataaaccttcaacattttatccataaatgatggttcatataaaagaatgacatctcttaaatcatggtcaatatttttaaaccccgatataaaattatgatacagtagcggaaaaacaactaaaaacaaaactatataaactgtttgtaaagaggaagcccacaataaaaccaaaatcacaaaagatatattagggattgcttgtaaaatagaaagaataggtgaaacatattcatctaccactttataacaatatcctatgtatgctaaaacaaatgctaaaacaacacttatcaaaacaacaatcagtacatgggataaagttataagtaaagtctgataaaaattcaaatcacccaacatctttcccatagttacaatcgtttcacttggaaaaggtaaaataacattgttatgaataccccacgctagtagttgccacaacaataatatacaaataatcaaacgaactttatgtttcattatttcactaacatatcatcactatattcaatatggaatgtttttaatattgattgaatatcatctttaactgcagtcgcttcttgataatgaatattttgattcttccatgttttcgctgcaattgctgcattaggaacaccaaatgtttctgctccaattttattaactaattcttcaatattattatcttctttcacagcttctttattagtaaattcatctaatttcaccaataattctttaacatcttctttatttttaacaaagatagctgcttgcggatatccagcttgtttagaatttgtctgtttttgataaagctcttgtaaagatgcaatattctttattgtctttccattttgttttgccttagcaatagttgccgttgcagctggttcagctattaatgcatattgtacttttcctgccaatacttgtgcttgcacatcactcacagcattatagtaagttactttcgcatttttcatcacatcattagaatcttttactaatttaaaaatcatacctggaacagcttgttctccaaatgctgctaattcattattttgaacaccttcattttcaacaagataaagatttccccaagtcaaaacacctgctaatttataatcagtttttcccttagctaataattgacagcctaaattaatgggtgcaacgatagcatcatattcactatctgctttcattaactcgctgcttactaagtcactaccttcaacaatattaatctttccattctttgtcacatcttcataaacgcctaccaatgataaagcaggcgctccattaggtgtcaaaattttcatttcatccgctgattttgatgttgagcatccagtaagtatcacccctaccatcatcaacattaataatattttcttcataaaatccctccttatttactttttattataatactttttaacttcaaatactatcaaaacgcctacggatcaacaaaacttcctttttgcaaaaaaacaattgataagaaatcttatcaattgttacaacttatcgaaccattaatatgatatgatacttgactatcaaccaattcattttcatctatacaaatatctttattgcctattgttatgcgtccttcatacatatgatcatcattctttttaaatacctgatatgcttgtttaagcaaatcgtcagcatcattaacttgaatatattctgctaatgaatgaataatctggctatcagtttgtaaatctaatttttcatgaatacctacatttgtataataatcaaaacctaatgtttgacttgtattttctccatttttatcaaatctataacttaaataataagtaatttcatctttttcaccactaacaacaaatgatattaaatcaatgtactttcttccagctaaggcactactttttgtataaacacaatcaaaatctaaaatatcatcaaaatatttcttaacattatctcttttttcgataacctttaaaagaactggatcttcattataaccattatctaacaattcttcaaaagtatgtttttcaaaatctataaaacgatagcgatcaacaaatgatggcagatagttcaccaagcccacaatcataacaataaacaagaaaattcctaataaccattttttacttttctttcgagtttgttgtgttgaatttgtatctccatgctgatcattgatcttccacccacaatttggacattcctgagctcctaatggtaaccttgtcccacaaaccttgcacttcattttctttcccctcgcttattctactatttcaactgaacaatatgttcgataagctgctgattcttcactttctgcttgttctgataaataaattttagtatccccaacaaattgacttatttcatagatttcctggtcactcttttctagattttgacaagctcgttttaagctctcatcaatatcacctacacctatataatttgctaaagaatgcacaatactattatcaacttgaaaatccaatgtttccctaatactttcgtttgtacgattaataaagaacaattctttactgacaatttcaccatcttgatcatattcataacgcattccaaaataagtatcatctttataaccagatacttcaaaagataaaccattaacatccttaccatctaaataactattttcttgcacattagcttctacaagttgtaaatcatatttaaaataattgaatgcctcatctttttcatttataaccttgaataatacatcactatccccataacctttattcatcaattcttgaaaagtatatttttgataatcctcaatatgataacgagaaataagtgctggaacagcaattgacccaataatccccataacagcaataatgaaaataacataaaaccaccctggatatctatctttcttattcaatgattgttgagattttttcacttgaatatgttcatggctttgtgatgtcacatcaaaagtattcacatgactatctttccacttatatccacaatttggacattctttttctccaggcattatccttgttccacaaacatcacatttcattctctcatccccttactttaagtatacgggatttatttataaaatgaaagaattactcatctattttcttagaagttagggaatataaacttggtccttcaatcagttttccataagcatcataaaccgattgatgacatggacatgtccatgtttggtcttttttacaaaattctacaacacattttaaatgcggacaataaggagacagataatgaagttcaccttttttatctttataaacagctgttaattttccattaacttttgtaatcataccatcttgtttttctaacaaagcgattggttcgtctaaaaaacgattagtaatcattccacgcttcgtatttttccacattttatctttatacttcattgcaaaagacattgaaaaataatgacaactataaagttcttcatagggattatctttttctaaaatcaaatcacttattaaatgagcagcaacttgtgataaagtcattccccatttttgaaaaccatatataataaattcattactataacgacttaatctaccaatgtaaggaattccgcggagtggaatactatcttgagcaaaccaatcttttgcatcacgatgaatttgtaaactatcctgtctttctaatggtcgataactctttgtttgatcaacacataaataactatcttttccttgatattcatcaacataatcaatatattctttttgctgaaacaatttaaaaaagtacaaaccttttcttataaagggatatcttgttgcatggacaagataacgacattggatacgcttattattgacattcaatacaaaagaatcatcttttctttcaacatgtgtgacttcactatgttcataaaaagtcacccctgctttttcacaaatctgtataagactatataaatattttaaagggtgaaagatagcctgatgttttaaacctaatgactctaaatgattttcatcttttaaagtttctactcttaatgattgtaagatttccctttcggcttgaatgattttgacatagcctggatcatccgtatatatataagcattgttttcttgaaaatcacaatcaatcttttctttttgaataattgttttgatttcatttaatgcgcgttcattagacttataataaagataagcttgatgaacatcataatgttttaccaagtcaacataaagagtatcatgcaaggtagaaatttttgctgtggtatgtccactcgtatgactccccatttcatctttatccaagacaacgacctgtttaccactatctttaagttgataagctaatcctacacctgataatccaccgccaataatcacaacatctacagttaaatcatcatgtaatgtttttcctattctttttttagaggttttttgccaataagattgattcatatttatcaccagctttattatcgacaaaaaacaagattttaaacctctttatcatatagaaaagacataactataaagccatgtcttgataatttctaaagtctaccagctcaatatgatgctgagccaaccaattttttaaccattcactgcataaaaaatcacattccattgctcgtacatgtgtaaatgatgaatgtgtcaagatataatgatctaaatatcctggatgaaaaatagcaacacaacaagcattttcttttatataatgaagattttcttccatatattgttgaggattataaagcccttgttcatcagctttaaaaaatggtaaaccaacaatcccattttgcttttcccattctttatccaaagctggattacagaaaaataatccatgacgttttgcaacattctctaaagcaataaagaaattcttagaaaaaacagcatgtccttcaaaataatccggatttctccctgttatttcttgaaatctaagaagttgtgcttcgatttctatctcacattcttgtatattaattgtatccttttctcttgctcgaatttctttacttgaacaaaattcaccatttgcttgaacaagtgagggaatgagacgaggatcactcaatggttttcccacacatatatttgtatgttgacctaatgcaatatcacaattattaattaattcatacccaaactgagcactttccatattaggcatcagcccaacacttgtaatcactccatctttaactgcttttaatattcctaaacttacagcttcactaaaaccaagatcatctgcacgcataattaatttcatattttttcgtctatcctttcttttaattcttttttctttgcttctaatttttgatcatatatctgatgtatataatctaacagctttctcccatcaaaactggcatataaagacattgctggaacatcaacaatggtaaatggattatgcaagattctttcaacattctttttttcaaaaccaatttgtgattctaacaatacaatatgtgcctcttgattatcaaaatcatcaatcgctaaggatttgatttgccaatctttttcatcactttgaagctttttcttcatatcaagggcaattaaatctgacatagctcccacacgactatgcaccaagacgacttgaaaaggattttctttgctatacttttctaattcctgttgagtctttcttaatacactttcaccatccatctttgtatagtcaacaccatcaataatcaaaaagggaatattgagttcaagacatttatgaagatattcatctttcatataagcaatatgtggtgccaataaaaagatatctgtttctagcaacaataaatgagcgctcaaagtatcactgcatcgaatatgatattcatgattaatatcagcttcttgcatcttacgaactaataaactcgttgacatcccagctccacaaaccaataagatatttttcattatttttgcaccttcttcattatttcttgtagttcttcataggttggattttgaattaattcccattgtaatgtttgttgacttaaaaatgtagaaatagcttgatagaaatgatctaattcttttatcatcttattttcaattgaagataataaaatgattctaatatgatgatttttccataataatggtttttttaaaattgtcacggatacaaatgtttgtgatgtaacaggttgatgagaatgtggaaaagcaacaaaatcattaaattctgttgttgcaagttgttctctttctaataccaatgattcaaaggaatcaggcaattgatagtattgatggcattgtttgatgatttgatgtattgcttcttctttgcttgaaaattgctgatcagcaaaaaataattgttttgggaagtattgcataattggtatttgatttaattgtttcaattgatgcgatattttgagtgtatcttcataccccattaaactatgaatcataaagataggaatagatatttgtcttgataaaggaacagttgtaaatatgcaatcatatggctccatattacgattttctaattcaagtaacgagcacacatctaagatatcaatataatccctaaaatgttctttaaagaaatattctaaaagcctggcacttcctactcctgaagaacaaacaagtaagatattctttttatatatatgattctttttttgttctaaagataaattaatatgtaaagcaaaatatgcaatttcatcatcaggtaattggcaatgataatgtttattaatcaattcacaacctttaaccgctaattcataagcgactattaacctcttttttatatccaacaatagtggattatccatatacatttgatattggattctttttaataaaggaatcatatgaagtgataaggacacttgtagattcaaatctgtactcaataaaatccccgaacttttttcaataacttttaaaaattcattaacgacattgtatatttcttgatcaatatagagttgtgaagtttgttgactattctttccacataagtgcatagtcaaataagcaacttctccttcttgatattccatatttaaaatatgactcattaatatcatcatagaacttgctaataaccattctttttcctctttaatttctttcatccaagcttcatcaatactcacaaaatgatgtttgcttgtacgaatataagcaatatataaataatgagaaatattttcaagattatcatcagttactacaaaatcataatttgcaatacttgatatcaatattttcttaatctgttcaaaaatgcttttatctattggatagtcttgtaaatgcccaattgcctttcttatatttatttcatttccatccaacctcatcccataatgagcttttgtttctatcataatgccatgttctacaaaatattgtctaagtttttttaattcttgttttaattgggttcttgataaataaagttcatcacataaatcatctatttttaaataattttgattatctataaatcgattaaacaaataaagaaatcgtgatgtatcatcttgattgccttgtaaatatgataaaaataattctgaatcttcaatatgcaattgataaccaaaacttcctgattcaattcttgctccaatgatattttcattgatatttttaatgatggtgcgtacacttcttgtactcatttgaatacgactggctaagtctttacctgagagtgtttcatgattcatcagttcaataagtaagtttttttgatttttatccattactgtgcacctccatctttattttatcataattactttgaaaaggctggtttttccagcctcattttattcacttattccttcttcttgacaagccatatgatcttgaactctaaagaatggataatatataattgctgttaaagcaattaagataacttctagaataatcccagaaagaccggcaatcatccaaccatctaaaattagtggcgttccagttgctcctaaagcaattcttggtaaagaaacaagtcctaaattcattgcaaaataagtaatgattgctgtaatctgaggaacaagtaaaaatggaattgccataactggatttaaaataattggcataccaaagataactggttcattaatattacatatagatggtaagatacataattttcctaacgatttatatcgcttgctttttgaaaacaataacatatcaagagctaagcccatcgtatttcctgctccacctaacatcaagaaataaagaaacccgactgttacaatattttgcattggttgcccagttccaaaagctgcttgattttcaaccccagcttgcataaataaaatcatcataaatggaattgtgacttgaccaccatgaatcccaaagaaccagaacacttgacaaataaacaataaaaccaagaaagtaataacacttccagataaagctgataatggagccgctagcacactatataaccattcactaaatgtcgcacctgtcaaagcattaaagatcccattaatcactaagaaaattccggtaatcacaaaccctggaattaatgcactaaaagatttagcaacagttggtggaactccctctggcattttaataacccaaccttttttagttacaaaagtataaataaatccaacaagtaaccccactaataaagctgtgaataaacctttagaacctaaataatcaaatgaaagaaccgttgttggcacttcattaatcatgacttctgttaaaggtgtcataataaagaaagctaatactgataataaacctgaaggtattgcatcattattcattccttcatttctgacataggcatatccagctgcaaaagcaacatataatgccattaaatcggttgtaaatttaccaaccaaagctaagatcttaccaattccgctactttgtaaaaaagcttgatatccaccaattgataaagtactgactaatgaaaaaatagctccaataataattaaaggcataatcatattaaaggctgtagagacagcttttaatatacgattgccaccaacctttgttgcgagtggtgctaaaacattttccatcttatccataaatttctgcattcttccctctcctttcgatgcatttctacaatatcattatataatagttcaattcattataaagactgtttatttcctctaagggtaggaaaagatttatataaatcaataaattctttcatcattgacttatataattgtaaggacattaacatatcttcagcatgaactagcaacaagtctagttcacattcttgatccaacaatttggcatgtatttgatgagcctttaataggagcttatttccattatctaaacagtattgtgcttgatgataattatcttgctttatatacataaaagcttgatgataaaactgttgagtctgagttgttaattgtataactgatattgtatcatttgtcatttcttcttttttcatatcatcaactcctacaatccctattataaaaaataaagcgtctttttaaagacgcttatatttcctatccttgcggaaatgattcatcgcttgtaattgtttgttgaggtaaaataatttcaattgttgttcctttatcaagttcactcattaaatgaatagttcctttataatgcgaaacaatatgtttcacaatagctaaaccaagtcctgttcccccacgttgtctacttcttcctttatccacccgataaaacctttcaaacacacgtgattgatccgctaaaggaatccctataccactatccttaacaacaatcttcattgcctcactcagttcttcaatacgtacacttacacttccatgatctttattatacttaatcgcatttccaataacattattaagcaaagtataaatttgttgatgattcccaatataagtcatatcatcaaaagtaacatccatatgaatatcatgtttagcaatctccacttcataactatccagcacttcctcaaccaaacctttcatctttaaaggaagcatttcaacctcaatatccatattttcaattcttgacaacatcaaaatatcattaatcaacccagacatactattcacttcatcttgaatcttctctaacattctttgtttttgactttcatcctgaattaagccctgtgctaataaatcactatatcctctaatcgaagtcattggtgttttcaattcatgagaaacattagaaaaaaattcactacgcattttttcggctttttttgctgcggttatatcaacaaacaaaagtgtcgtacctaaataaacacgtgaaatataacaagcataaatactatgattaatttttatttgtacttcttgtttaggaacattattttctaaagcattaatgatttctggataatatagataatccataaactgatcataaggtttcatatcccctaaaatagaaatagctctagcattaatacttaatattttataattttcatctaataaaacaaaaccttcattcatttgttttaagatttcatccattttaatacgttctaatttcacttctctcatcgacttacgtaaacgatgagaaagattatgaattgtattaacaataatattaaactcctgataatcatatttctttaaatcaaaacgaaaatcttttgtcatatgatctaaactatcactaatttcaataattggtttagaaatagtataggccagctttcttgataaaaagaaagcaatcacaaatgagatcattgcactgatggataaagctggtattaacgaaggcaaataatcaataagaccattataaggaattgataatcgtaaaacataatcttgattataataggctacatataacgtcttttctcctgttgtttctgaacgtctaatagcataaccttctttatgtttaaaagcttcttgaacttcctgacgttcaaaatgattttctgaaatcgaacgtgatactgtatcggcaacaacatttccttttgtatcaataatactaatacgggtttgatcggaataagctaatggattaagtttatcaacttgttgttcaagggattgatttttatcaattgcataatcaattaacttcaacgagtataacatttctcttttggttgtattcaacaaaccatttgaaataagtgttgctgaaagaaaacaactgcttaaaagagcaataattaaaataaatataaaataacggaggattgacttagtcatgtgaatcctccttttcaacaaatcgataacctactgatcgaattgttttaatatatttttctccatcatcatctaatttctttcttaatgatctaatatgcacatctagtgctctagactcacctataaaatcataaccccagatattattcaataattcatctctttcaacaacacgttgtttattttctattaaatataacaacaattgatattctttatgtgtcaaatccataatctgatcaaaatgagtcacaacatgtgttgatttatcaattgttagacttggagttttaatctgttttgattttggttgtacccttcttaataatgtacgaacacgagcacatagttcaagaacgccaaatggttttgtcatataatcatcgctgccactatctaaaccatgaattttatcaatttcagtatctttagcacttaaaattaaaatgggaacttgggtatttgtttctctaattttctttactgctgtaattccatccatttgtggtaacataacatcaaagattgcaagatctggggcaaattcatggaaagctgcaatcgcatcaatagcattatcaaacaaaataacttgataaccattggattccaatgataatttcacaatttcctgaatattttcatcatcttctatgacaaatatacgctcgttcatttttcttcctcctaaataagtcggtgttgattgactgttcccgtctgattaaattctaaccattcacaaatattaacagcatgatctcctactctttctaaatacttagcaatcataagaaaatcaatacaataatccaccttttcactattttcctttaaaatttcaataacctcttgtttcacttcttcaaacaaactatcaatctcatcatccatatccttaaccatttgagccgttgttaaatcctttttaataaaagcatcaatcgcttcatgaaccataatctttgccttcttagccatagttggaatatgttcgactgtacgataagcatgtttcccttcaaaatgataaataatttctgcaatatcagctgcctgatcaccaattctttccaaatcagtaacaatctttaaagcagaagttacatttcttaaatcactagcaattggctgttggcgtaaaattaaactaaaagccctagattcaatacttctttccatatcattaatcaatcgatcattttcaataatctctttagccaaagctttatcatgatgtttaaaagcatcaatcatattttctatagaaacttcaaccaaatgtcccatctttgttaaatcaatatttaacttatccaattgctcatcaaaaactctacgcatcataatactacctccattatatttattttttcatcaaaacacaaccattaaccaaaacgtccagtaatataatcctcagttcgtttatcctgaggtaatgagaaaatatcttttgtcttaccatattccaccatttcacctactaagaaaaaagcagtataatcagcaatacgtgatgcttgctgcatattatgagtgactatggctatcgtatacttgttctttaattccatcagcaattcttcaatttttaaagttgaaatgggatccaaggcactggttggttcatccaacaagatgacttctggttcaactgctagacatctagcaatacatagacgttgttgttgtccaccagataatcctaatgctgaagaatgtaaacgatccgcaacttcatcatataacgctgctgcttttaagcttttttctacaatcacatctaattcttttttatttttaatcccatgtattcttggaccataagcaacattatcataaatactcataggaaaaggattaggttgttgaaaaaccattccaactttctttcttaaaatcgttgtatcgactcgactatcatatatattttcatcatctaataagatttcaccttcaatctttacattatttacataatcattcatacgatttaaagtctttaagaatgtagatttaccacatccagaaggaccaataaaagctgtaatcttattttccataatatctaaactcacatcttttaaggcatgtttttcaccataataaagatttaaatttcttgcttgtatctttgccataatttatcctctcttattcacatcaaattgatttgaaatccattttgctataaaattcaacaacaaaataattaatattaatataaatgcaataacaaatgcctgttcataatgagcctttgccatctctaaataaagctgaattgtcaatgtcccaccactagagaaaagatgtccaaataaacttttaggcaacacggataaacttccagcagtaaatagtaaagctgccgactcagctacaattcgacccattgctaaaatcactcccgttaaaatacctggaatcgcacttggtaaaagaacacttctaatcatataccatttcgttgagcccatgcctaaagccgcttctcgataactcttaggtacagcttgcaaagcaacttgtgcatttcttgagataatcggtaaaatcataatggcaagtgttaaagatcctgttaaaattgaatattctaatttcaacactccaccaaaaaacaacattccaaataagccataaataattgaaggaatcccagctaaaacctcggttgtaaaggaaatgatattcacaaactttttatttgttgcatattcatttaaataaatagccccacctattccaattggacaagcaatcactaaggttacaacaatgatataaatagtattaataatattaggtaaaatccctacagtattctttaaaatgcttgttgtttgaataagataatcaaacgaaaaatgtggaatccctcgataacaaatatatccaataataaccaccaatagtgaaaccgaaataaaagtagacaattgaatcaaaacatgaacaacattatcaataaccctacttttcttttcataaatactgttattcatgttgatcaccccttgtcaaaatataagtcaatactaaattaatacaaataataaagataaacaaaatcaaaccaatcgtaaataaaacttcacgatgtaatccagatgcataactcatttcagtaacaatcgccgttgttaaaaaacgaacagaatgaaatggtaaaggtatatttactgaattaccagctactaataatattgccattgcttcaccaattgcacgtccaacacctaaaacaattgctgacataatcccattcttagctgctggtaaaacgactttgaaaatagtttgaatttgacttgcccctaaagctaaagaactttttcgataatcatcaggaactgtttttaaagctgtttcactaatattaattaatgttggtaaaatcataatcgctaaaacaagaatagccgagattaaattagagccccctgtaaattgatgggttaaagaatctttgaagataaacaactcaagttgatacatgagtggattgataatgaggattcctaagagtccatacacaaccgaaggaatccctgctaagagttcaatcgctgattttacaaccttcctcactctttttgaagcaatttctgataaattaatagccgttaataaaccaattggaaccgcaatccctatagcaagaaatactcctacaatagatgttagtataatatataaaattccatactctggatgtgtcgcggtaggtgcccaaacctgaccaaataaaatatctgttaatccaactttaaacaaagctggtgttcctgaaataaacatatacgcagtaatagataacactgcaataattgaaacaattgcacaaccttttaaaataattgctgctgctttttcaacagttgatttacttttatgatgagcgagaattgataacatacttctttccataatgtcctccttattgtggactcattaatcctactgattgtataattttttgtccttttggactttgaagataataaaagacatcttgaacttcttttctttgtttttcaattggaccataagttgccatcacaaatggtctttgtaataaatacttacctgattgaatagattcctgattaacttccacattatcaatcgataaagctttaacactttcatctaagacatctaaagaaacataaccaattgcccctgaaattgaaccaacctttgccataactggacctgtttcattgtattcattcgcatattggcattgttcctcaatcttaagaagttcttcaaatgcaactcttgtacccgaaccagcttcacgtccaataactacaatcggctgattattaccaccaacttcctgccagtttctaatcttccctttataaatatcaattaattgttgacgggttagattattgactggattatccttgcttgtaatcactgcaattgcatcaattgcaactatattttctactaagccttttttcttttcacttgcttttaaagctcttgatgaatttccaatatctgctcgatgttgaagaactgcttcaatccctgaactagaaccagtaaactgtggttctaattgtaaagatggatattcttcacttacaccttctcttaatgcattcatcagtttttccattgacgttgaaccatctaatgataccttatgataaggatcttctgcttttgcctgacagccaaaaatggtcgcaccaatcacaacaagaaaaactaaagaaataacttttattttattcactttataatcaccttactttttcttaacacaagcatagtttatattgttttatctttaacaaatatcaaagacatgtataaaatgtgttaagattttgtaaatagtatacccaaaaataaaagtcacgataattcgtgactacttttgtggaataattaatttaacttgtttaataactgcttgtcctttttcactattaatgaaattaaatacagcttgtacttgttcactttgttcttcaatctttccttttgttgccataacaaatggtctttgtaattgatagctgccatctaaaattgttgattcacttgctgttataccatctaactgtaaagtattcactttatccttactatcctcaacaatatctaaagaaacataaccaatagctcctttggtttcttgaaccttagccactacagcacctgtttcatttaattcattagcatattgacacttatctttaatatctaaaatttcttcaaatgctcctcttgttcctgaagctgcttcacgtccaacaacaacaatcttttgatcagccccaccaacttctttccaattcttaattttaccagtatagatatctgctaattgttgttttgttaaattctttacagtattacttttttcaataatcatcgcaatcccatctaatgcaactacattttcttcaattccttgagctttttcttcatcagttaaagctcttgaagaattaccaatatccactttcccagaagcaaccgccttgattcctgaacccgatccagtaaattgtggttctaatgataattctggataatcttcacgaattgcttcttttaaagcattcatcagtttttccattgaagttgatccttctaaaacaactttaccgctgacatttgcttttgtgctttctccctgatttgtttcactatttccacaaccaactaaacttaaactcaatacacacgctaataataaagttcctaattttttcattatatctttccttccttgtctttcttattgacgagtatagtttatatttttttattattttaaaatagacagattatcttgagtttaagttaattttttgttaaacagatttatcaattttgtagttcactttcgataacttttcaaaagaataggagtataatagaaacagaaagaaggaatgattatgtcactatttgtaaaagtctttagttttcttattccgattatcatgattattatgggtataaaaatgtggtttttaccagttagaacaatcaatccccatcatggttatcatagccgaaaaagcatgttatctcaggatgcttgggactatgcccaagcttgtatgggtaaaacatggacattagttggaatagcattaatttttgttactatttttctattaccacgaattgctctttctgatatcaacaccctcattacaattttaagtattcaaattgttttcttatttctaccaatggcttgggtagaaatagcattaggtagatttgaccaataggtattgacaaaatacctattttcattatctttataaataggaggtcattatgaaagaaaacaaatatgatcaagattcattttttcaaaaatatagtcagatgagtcgttctcaacaaggtttagaaggtgctggagaatggcatgaattagaaaaattattaccagactttactaatcaacgtgtacttgatttaggctgtggttatggctggcattgctggtatgctatggaacatcttgctaaaagtgtaataggtgtcgatatttcacaaaagatgttagatgtagctaagcaaaaacatcatcatccacatattgcttatcaaaatagtgctatggaagatttagattatcaagaaaattcttttgatattgtgatgagttcattagcctttcattatataaatgattttcaaggacttgttaaaaatatctctcattggttaagtccaggtggttattttgttttttctgtagaacatcctatctttactgcacaaggttcacaagattggtattatgatgaaaatggtcaaattcttcattttccagtagataattactattatgagggaaaaagagaagcacactttttaggtgaatcagtcatcaaatatcatcgtactttaacaacctatctgaatactttattagaaaatgattttatcattgagaatgttgttgaaccaatgccacctgctcatatgatggatcttcccggtatgaaagatgaaatgagaaggcctatgatgttactaatcaaagcacaaaagaagctataacttcatatagcttcttttcattttataaagtttgttcagttctttcaataatatcatcttgtgttgcttttgataagacattgaagaatgctgaatatcctgcaactctaacaattaagtcacgatggttttctggatgaagctgtgcatcaatcaatgtttcgcgatctacaacattgtattgaacatgatatccatgtaatcgattaaagaatgtcttaatcatcatttctaacttcatcttattttcttcagttgatagcatttgtggtgtcactttttgattcaataatactccaccagtaatctcatgtgttggtaattttgatactgtcttaaagactgctgttggtccactcttatccatcgcatgggctggtgaacatccctctgccaatggtgtacgtgcctttcttccatcaggtgttgccattgttcctagaccttgtccaacatttgctgagatggatgatgttcctgcataacgaatcccaccaattggtcctctaccataacgtgtatttggatatttcttcatttcatcgatataagagttataggcttcaacaaccaattgatcaacatagtcatcatcatttccatatttaggaacatcatgaataagcatagattgaattctttgattatcttcaccttcaaagtctgcaagcatagcattccataattgttctggtgtaattttcttttcttcataaacaagctttttgatagctgctaaactatctgccatattggcaattccaatctgtaatccagaaatgaagtcatagattgctccaccttccttgattgtctttcctcgtccaatacaatcttgagtcaaggctgaacataagatatctggaatttcacgctctcctgctatatctacagcattttctacaatcacagaaactcttgtcaattctctaatcgctttatcccaagcggcctgtaattcttcaaaagatttcatatctttaaaatgtccactgccactgacaaatctcttacctgttgctaaatcaataccatcattcataacacaaagtaagattctagggaaattcaagtatgacattcctgtacaacgatatccccatttacctggtactgcagtttctacgcatccaatagctgaataattataagcatcttcttccttaacacctaaatcaataaatgatggtatgataatttcatcattattgaaagctggcattcctgttcctaatttcataacttcaatggcttcatctaagaattcttgaggtattccattataatatctgactgtcaagtttggttgaggaagtcttgtttgagcaactgattttaagacaagatatgataatttattaattgcacattttttatctggtgtttgaccaccaattgttacattttgatacattggacttcctgctgatgaatacgtatgagcctgtgaacgaactttattgattgttaaggtcttaatccacaagtttgttaataattcaactgcttcatcttcagtaattattccagcatctaaatcatgttgaagataaggatagatatattgatcaaaacgtccatatgataatgaatgtccatttgattcaatctgtaaaattaattgaataaaccacgttgattgaatggcttcttgaaaagtttcagctggttcataaggaaccttagcacaaattctagaaatctctaataattcttcttttctttttccattagcctcttgagcttttttatatgctaaacgactgaatctatccgcatatatcttcactgcttcaatcacaatcaagacagccttataaaacatatatttatcaatactttcaggtttacataaatccaattctgcttttaatctcttgactctttcctcatatccctttaaaccagtttgtaaaacagtctgataatcgactgccaaatgagcatccccagaatttaacttaccttccattccaagtaatcctgtcgacataatatctctcacttcatcaggaagcaaagcatcacctttagctcttaaattattattttcccaaaatggagcaattgaacgcaaagcttctttggtttcttcagtaatatagaaaacatctccatcacgtttttcaaacttatccaattcatcaattacaaactctaatgtatactcaggaaatattggtgcatctttattagaagatgcttgatttccaacaatcaaagtttcatcttcaatataaatagacatcttctctaaaatattttttaacatcaaagctcttttcataacagctggctgattttgatgttctttataggcttctgtagctaagagtgctcgctcagcacagatatatggtttcttttctaaaaccttctctctaaattcattcatacgtggtgtcaaatctccaaaatgctcaacatttttcattatgcttcctcctttatttcatttgaaagttatttctttttcatttccaattatatcttatcacaataaaatataaagtcaatatttatcccatacaaaatatgttatagtttcattcgtaatattttatttacttttacatattcacatgttatgataaagatgctaaaggagagatcttatgtcaaagggaatggtttttaatattcaaaaatttagtattcatgatggtccagggattcgcacaactgtctttttaaaaggttgtcctttaagatgtcaatggtgttctaatcctgaatcgcaacttgatcatattcaaattctttatgaccaagaaaaatgtgtccattgtcaaacttgtgttcacgtatgtcctcatcatgcgattaaacatcaaaaccaacgaattatcattcaacaagatcaatgtgttggttgtttatcatgtgtgcaagcctgtccacaaaaagccttaagtcatgaaggagaattaaaagatactgatgaaattgtgagaatttgtttgcaagatcaagatttttatgaagaatcagatggtggagtaacgatttctggtggagaaggaatgagtcagcctgcttttgttagggagttagtagaaaaactgaaagctaagaatatacatatggcgattgaaacaactggttatattgagccagatatattccatgaattagctcctttatttgatttgttgttatttgatgttaaacattatgatagtcaacaacattttaaagggactgctgtctataatgaattaattatttcaaatttaaaatgggccattgaacatcatattgaagttctaccaagaatcccagtgattcctgattttaatgcatcacttgatgatgcattaggtttagcaaagcttttggtatctgttggagcaaaacgtgttcaacttttaccttttcatcaatttggtgaaaagaaatatgaaatgttaaatcggaattatacactaaaaaataaaaaagcccttcatccagaggatttaaaggactatcaaaaaatatttattgatcaaggtcttgattgttttttctaaactaggtatatgcctagtttttaataactcatttttcctgggataacccctctaataccacctttaggtgaaggtgtatctcctatataacggggaataagatgaatatgtaaatgcataatagattgaccagctgccatttgacaattcatcccaatgttataaccatcaggatgatatttttcatctaacaattgctttgcttcatcaagtaacttgaataaatgaaggcgtgtctgctcatcagccccaaaaaagtcaacaatatgttttttaggaataatcagcatatgtcctagactcactggataatcatcataaattgcataaccataatcattttctaaaatataatcatgtttctcacaaaacaaacaactcataatgctaccttcttaatcattacattttgttctaataaatattgttcacaactacttggaatcccatcatcactcacaacacaagcaacatcttttgttggtaataaattaacattaccaatatgattgaatttagatgattctgtcacaacaataaccttagcagcctgtttagccatatctcgcactgtttcactacgcatataatcattacccgtaaaaccagaagcttcagaaaaaccatctgtaccaatgaagaatttatctacaaagaatgtttcagcacattttcttgtcattggtcctaccatgacttgagattctttttgatattctccacctaataaaataatccgaattgttggcattttacgaacataatcagcaataaatgccgagtttgtaattaaggtcacatcttttcttgtttgtgctatttctaacgctaataaagcacaacaagagccagattcaatcatcactgtttctccattttcaactgattcacatgcaagtttagctattttttgttttaaatcataatgatatgctaatcgattattaatatcatcacttgaatttaaagttgcaaaaccatgagcacggatgattaatcctttttgttctagtaaatctaaatctttacgtatagttacttgtgaaacttgtaaaagttctgaaagttttgttacttcaactttatcattttcggttaatagttctaatatttttgtatgtctttctgacatttttgccattttcatcacccttttctttctttagggtaacatatagatatttcaaatgcaactttttattatttcaaaaatgaatatattttatatagaaaaaaagtaatccgaagattactttttatgagtatggcactttccagccattggacagcccccacaaccactgctacaagtatgttttgtttgaatctgatgcttaataatcattatcacaataataagaagaatagccgcaacgataatcgttgataagttattcaaaatccaattcatcataagtttcatcttctttcatcttttttggataaggtctaattaataaataaattagtcccagcattataatcaccccaatcaacatttcaaatgttattgaaagagttgtaataaaggttatcaattgataaatcaaaaatgccataatataagcaaaaatcgtttgataaccaatcgcaaatacaaaccattttcgactattcatttctctttttatcgctcccatagcggcaaaacatggggcacataaaagattaaaaactaaaaaggcatatgctgaagcgacggtaaaggttgaagctaacatcggccaatattcaacaccattttctgcgacttcaccaaaaccatatagaatacctaaagtacttacaacattttcttttgcaaccaagcctgtgatagttgcgacagcaccttgccaatgtccaaaaccaagtggcgtaaaaatccaagctatcattcttcctaacatcgctaataaactgttatttaattcacttgcttcaagcattctccattgaccatcaacaaaaccaaagtaacttgtaaaccaaacaaaaattgttgacaacaagataattgttccagctttttttataaatgatgaacctctttcccacacacttctcattatatttcttgctggtggaatatgataagctggtaattccatgacaaaaggggcaacttcaccagcaaacattttagttttctttaaaataattcccgacataacaattgctgccataccaatgaaataagcacttggagccacccaactcgcaccattaaataatgctccacttattaaagcaataatcggtaacttcgctgaacaaggaataaatgttgttgtcataatagtcattttacgatcacggctactttcaattgtacgtgttgccataaccgctggaactccacatcctgttccaattaacattggaataaacgattttccagaaagtccaaactttctaaacaaacgatccatgataaatgcaactcttgccatatagccacaaccttctaaaatagctaagaaaaagaataacactagcatctgtggaacaaatcctaaaactgccccaactccagctacaataccatctacaatcaatccttctagccaacttgctacacctatcatttgtaatgctgaacgaataaaatctggaatacttgggatcatgcttccaaacaattcaaaaccttcaccaaatatagattcatttacaaaatccgttgccatagtgcctattgttgttactgaaatataataaacaaaccacataatgaaagtaaatataggtaatgctaaccatctatttgtaacaatttgatctattttatcagaaatagataattggttttgattttttcttttataacattcatcaataatagaagtaatatattgatatctttcattcgttattaaactttcactatcatcatcttcttgtttttcaatgacttgaatgagattttctatatctattttttgtgataattgagcttgtattttttgatctctttcaaataatttaatcgcaaaaaatcttttttgtgataaaactatatcagatggtaaatgattttggatatcttcaattgttctttcaatatcataagaaaaataatgttgaattgtgacttcctgatgagcaactttcatgacttcatcaacaatatcttcaattcctttttcctttaatgcagatatttcaataactggacaccctaatttttttgataatgcctttatatcaatatgataaccattctttttaactaaatccatcatattcactgcaatgactgttggaatccctaattccaacaactgcgttgttaaataaagattcctttctaaattcataccatcaactatatttaaaataacatcaatatgttcatccaataaataatttcttgctaccacttcttctaaagtataaggtgacaaagaataaattcctggtaaatctgttattttaatatccttatttgtttttaagtttccttctttcttttcaactgtgacccctggccaatttccaatatattgatgagaacccgtcaatacattaaacaatgttgtttttccactattaggatttcctgctaaagctattgttattttcatatatatcctccttagttagtttcaactaactttaatacaaaatcatattattgaacttcaatcattgccgcatcagcttttctcaatgataactcatatccacgaacattgacctcaataggatcccctaatggagcaactttacgcacagttaactgagttcctttagttattcccatatccataattcttctctttgttgcaccttcaccatgcaattttacaacacttacaacttctccaaccttgacttcttttaacgtatacatctttatgcaccctccaccataattttatgtgccatctcttgactaatcgcaacccttgattcttttatattaacaatgatatttccttgattataagaaacaatcgtcacctgtgcaccttctacaaaacctagactttcaagaaatttcttacttttttcttgaccctttacttttaatatcttatgaacttctccaattcctacaaatgttaatggcatatttatcctccttagttagtttaaactaactttactatcaaataattagttagactttgctaacctatgaactaagtataatcttttactttctatttgtcaagttttttatcaaacaaaagaacacaagcattaatcctgtgttcccaaaatttcaaaagtatttccttctacaaacatatcaatttttcctgtgtcttttaataaatcatttttcacaggcatagctaaataaagtgtccttgtttctaatggttctatctttccagttgttgatattgatttatgattatcactttcaataatgatttgagattgaattgtctgttgattgattgtatatatgcaatagatgtattcacttggatcaatagtatgttcactagtgtttttaagctctatttttaaggcaacaaatgtttcattatcattatctgttggatgatagctatagaagaatcctttatttgatggttctatcttctgtgtctgtaagatttcatctattgtgatatgactatcttttaagtttaatgaatctcctacagatttttgagtttgaataacttctggttcttgtaatgtcgaaaaattgtattggacttcttccttatttcttatttttaatttcaaattagcttgttctttgatatttgattcattgatttcacaatagatatgaatatatctttcttcatcttctttaagtgtatcagtttgacttatttgattatacttaagattttcaattgctagagatgctttatatgattgatgattaatgacaaatgttccttgataaatatcttttaagatatattcttttttggataaattctttgtttttaatacaacatcaatgaattgattttcatcttgttttggttttattgatcgataagtattatttttattggttggttctattttatttgttactgtacttttgacaatttcataacgtaattgttcatcaaatgtatatgactttgatatttctatttctgatactttttctggtgttggaacttcatctctaggctgacatcctaataaacaaaaactaataagcagtaatattcctaatttcttcatacatgtccttctcctcttagcttttattttatcatactttgtcgtagaaacgaaataattctttttccagttaaaaaccttaaaatcagatttgattttaaggttctctttttttattcaataactctaactttaataacattttctaatgcttcaaaatcattcatatctacaacatcatttgtttcaatgattgtataagcatattctcctttggctttattaaccatgttttcaatgttaatctcacgattagctaaaagagtggcaaattgtgcgagcatgtttggtatgtttttatgaattaaacaaatacgatattttgtggtacgtggttcgttaatatatgggaagttaactgagttcacaatattgccactttctagataatcttttatctcttttactgccatgcgtgcacagttatcttctgattcaggagttgaagctcctaaatgcggcatgacaatcacattttcttgattaataatatctggtgatgcaaaatctgttacatatttagcaatcttcccctctttgactgctgctaaaacatcagttgaattaactagatcccctctagcaaaattcaagatacgcacaccatctttcatcatatcaatactttctttattgataagtccttttgtttctttagtacttggtgcatgtagtgtaatataatcacattcactaaagattgtttccatattttgagcatttttaacccatttgctcattccccaagcagcattcactgaaatatatggatcaaatccataaacttccatccccaatttaatcgctgcattagctacatgaacaccaattgcacctaaaccaataatccctaatttcttaccttctaattctggaccaacaaattgacttttccccttttcaaccaatttgctagcatcatctttcccctctaaagttttaacccaatcaattccttcaacaattttacgtgatgataataaaagtccacataataccaattccttaacagcatttgcattagcccccggtgtattaaatacaacaatcccctcattgctgcattgatcaataggaatattattaactcctgctcctgctctagcaatagcttttaaatttttattaaatgtataatcatgtaagcttgctgaacggacaagaatcccatcctcatcgtcaatatcttcaccaacttgatattgttccccaaacaaatcaagccccactggtgaaattttattcattaatttaattttattcatatatggtcacctacttattttcttcttcaaattttttcataaatgctaataatgtctctaccccttctaatgacatagcattataaatagatgcacggattcctccaacagaacgatgtccttttaaattagacattcctgccgcaattgattctttgacaaacttagcatctaagtccttatttggacatgtgaatgtcacattcattattgaacgattatcagcatcactatgtgtttgataaaaatcagtttgatctaaataatcatacaataattgtgctttttcttgattcttcttttgcataacttctaaaccacctaaagaatcaatccattcaagaactaatcctaaaacataaatagaaaatgttggtggtgtattgtacatagaatcattatccgcaatcgtattatattccattaaaacaggaatattctccttatgatcttgaattaaatcttctcttacaataacaacgcctaaaccagcaatccccatattcttttgtgctccagcataaatcatgccataatcagcaacacgaattggtttagataaaatatttgatgacatatctgcaacgattggtacaccttttgtatctggtacatacttccattctgttccatagattgtgttattcgcacataaatgaacatatgaagcatcttctcttaaatctaattcattttgtgtaggaatatgtttaaagttattaacacttccatcatatgcaatatgaatatccccaaatttttttgcttcttgagcagctttcttagaaaacgctccagtaataatataatcagctttcccattctttaataaattaagtggaatggtagaaaattgctgagttgcccctccttgaataaataagattttatagttatccggtatatttaaaaccttttttaataaagctttcgtttcattaaatatttcaagataggacgatgatctatgactcatttccattacgctcattccactatctttatagttcaacatttgagccgctactttttctaatactggtacaggtaatgttgatggacctgcagaaaaattgtaaactcttttttgtgtcattgttgacgtcctcctttttaaatgttgttgtcattatatttgatttaaacaaatttgtccagtaatattattaaaaatcataaattttttaataatttgctttaaattgtatacaattttgttatatttctataactattcttattatatttactaattttataaatagaacaaaaaaataatctattggctttattcaatagattattcttcatagatataaaatttttgttttaaagtctttgctttatacatagcccaatctgccttattaaaaaattcttcataagtatcttgaccattataactagctatcccaacactaatagaaaaaggaactttttcatattgatacatcactttatcaaataacatattaagctttcttataatctcattatgttgtgtatctttcataaaaaccacaaactcatcgccaccaattcttccaatcacatcagaatgaaagacttcattgagttgactagcaaaccattttaatatttgatctccttgaagatgtcctaactgatcatttaacttcttaaaactatcaatatctcccattaataacgttccctgcttcaagttttctatttcatttttaatcatttcttcaacagttaccttattataaagatatgtcaatccatcttttcgagatatttccaacaattgattttcatatttctttaaatcattaatatgaatcaacaacccctcaatacgataaagatgctttcttttataaatatattggtactctactaaaaaccaatcattatttaatttcaattgtaaagtatcactttgcttttgatttaatcctaataatatatccttaaatatcaattcatctttttcttttaaatcattcaaaaaagaagtatatgaacaacatgaagaagatacaatataaagtctttgattttttaccatatattgaaatacagttatatttttaaatcgttttaatgtatctaaactattcagttttaattttaatatctttaatttacattttattacttgatatttattcataaaacttcctctctgtgacaggttgtagacaatttggcacaaggggtatatactgaaactaagagaatattgcgagtatatcccctatttttctttttatatttatgtgtgacaaaaattctacaatttgtgacaatctcacaaatttttttgatattctttttccttcacacgtcttaaaaatgtttgatatgaaatccctaatcgctgggctgccttacgcgatgaaatgtctcccttggaccataaataagcataatgatcaaattcataggacaactgaatacgctgtggtccaaagtgaacacctctagctttagctgctgcaatcccttcagcctgcctttgatgaataaattccctttctgtttgagcaacatagctcaataattgtaaaacaatatctgaaatcaatgttcctattaaatcatgttcttttcttgtatctagtaaaggcatatctaaaacaacaattctaacatgtttctcttttgttagcattcgccactgctcaataatttcttcataatttctacctaaccgatcaatactctttatcactaatgtatcgttatttttcatcttttctacaagtttttgatatttgggcctatcaaaattctttcccgattgtttttcaacaatgatatgtgactgactaacaccaaaattcaacattgctataacttgtctttcttcattttgatctttactagaaactctcacatatccataaacttcttctttcatactttcacctccatctttattgtaggcaaaatgacaaaaagacaaacaaaaaagcatcaatcatcaagactgatactttcaattctttgtactgcttcttttatatagcttccaacatcattaggctgatgagcatctgaagtcgttatcagttgtacatgtgcttttttaaacaccttcaacaattcatcagatagccccaaatcttgatgattgtatcgataataacaacctacattattttcagctttcatatggtgttgatttaataattgagctaatttttcataagttggtaataaatcatatgttggataaatattaaacaatttaattgtatctggatgtgctaattgagtaaataaatcagattcaaccaattgaaaaacaagttcataatatctcttataaatatgattaacatcatatttatcccacaacaattcttttgaaaaactcatatcatataaaattccatcaatagaatgaatagctcctacaataaaatcaaaatgatattgtgataatacttttcttatatattcttcatgttgaggtacataacaaacttctaaaccatatgtgactttaacaggtaaatccatctttttgatatcttccattaattgaataaagtcactgatatgatctttgaatttcatctttttattttccaaccatactttttgaacttcatattgctttaattcttcataaatgggttcaaattctataaatctgtgtgtatgatcaagtatttgaatctcatctaatcccttttgctttgctgcttctacaaaagaaagcacatattcttttgtaagtggtccattttctaaatgcatatgaccatctatcatattaatcatccccttttgcataattatatgaaatcatatttatttgtaaataaatatgataagaaaaagaacagatttaatatctgttcaattattcatacatgaatggtttttgttattatttacgagtttaatccaattcaaattgtcctgtatacaattgataataacgtcctttttgggcaatcaattcatcatgactaccacgttcaataatttcaccatgatctaagaccataattgcattagaatttctaaccgttgataatctatgtgcaatcacaaagacagtacgattttccatcaagcgatccatacctttttcaataagtttttctgtacgggtatctattgaacttgttgcctcatctaaaatcaagactggtggattagcaatagccgctctagcaatcgctaaaagttgacgttgtccttgtgacaagttagctccatcccccgataacattgtattatacccatctggtaaacgtttgataaaactatgagcattagccaatttagctgcttcaataacttcatccatagttgcatttaatttcccataacgaatattatctgcaattgtaccagtaaataaatgtgtgtcctgtaaaactatagatattgattttcttaaatcatcttttttaattaatttaatatcaattccatcataagtaatacttccactatgaatatcataaaaacgattaatcaaatttgtaatagttgtttttcctgctcccgtacttccaacaaaagcaatcttttgacctggtttagcaaataaattaatatcttttaaaatcgtgacatcttcattataaccaaaaacaacatcatggaatcgcacatcaccttttagctgaacaagttcaatacttccatcatcacgaggatgacgccatgcccaatgtcctgtatattcttgacattcgctaattgttccatcatgatgtactctcactcttgcaagtgtaacttttccatcatcaatttcttctttttcagccatcatttcaaatattctttctgcccctgccattgcagctaatacaaagtttaattgttgggtaaattgatttactggctgagctgtttgtctaacaaaaatcaaatatgaagataaacttcctaaatccatcattccagcaattgtaaagaagccaccaatacaagcaactaatgcataattgaaataagaaatacttacaactgttggaatggttctaccagaataagttaatgcttcagtagaagcatgttgaagaatttcattacgacgattaaattcttcaatattcttttcttcatgattaaagactttaacaacttttactccatcaaccatttcttcaataaaaccatttaaatttcccatagctgcttgctgatgtgaaaagtaatatttactacgtttacttagatattgaataacaaaatacataataatcatacaaaataatacaatgagtgataattgccaacttaaaacaaagatcaatattaaagttccgacaatcataataaagctttgaattaagttatcaaaacagttattaaaagcgtcttgaactgtatctaagtcattagtaaaatggctcattatttctccatgtgtatgactatcaaaatatttaataggtaacttttgcatacgatcaaataaatcttgtcgcatttctttaacaatcttttgtgatgtatgaatcattaattgcttataaatggctgttgaggttgctccaatcgcataaacaatacccataaaaataataaaatgcactaatccttgataatctccaggtaatatatacttattaacaacagtacgaatttgaaaagttccccaaagattaactccagtactcacaataaccaataaagcaactccaaataatgcatatttatgatgccccatatatgttctaaaagaagcgagagtttttaacatatctcttggttttgcatttgttatttgtcttgccattacaaaccagctccttccatttgagaataataaatatcttgatatatcttattattctttaataattcttcatgtgttccaattgcttcaatatgtccatcatctaaaataacaatctgatcagcatgttgtacagatgaaacacgttgtgcaataataatttttgttgtttctttaagcgttgctaatccttcacgaatacttgcttctgttgctgtatcaacggcacttgttgaatcatcaagtatcaatactttaggatgtttcaataatgctctagcaatacacaaacgttgtttttgtccaccagatacattaacaccaccttgtcccatatctgtttcataagctttaggaaactgattaataaactcatcaacacaagctacatgacatgcccacttaatatcttcatcactcgcatgttcatttccccataaaagattttctctaatcgtaccactaaataaagtattcttttgtaaaaccatacccacactatctcttaaatgctcaattgaataatctttaacattatgaccatcaataagcacttcaccttcacttacatcataaagtcttggtattagctgcactaaacttgttttggcagaaccagttccccctaagatacctaatgttgatcctgctggtatgtgtaactgaatatcggttaaaacaaattcattagcttcttctttatacttaaaatatacatttttaaaatcaatgtttccttgatgaacaatcaattctgtattttgcggatcatgaatatctggaacttcatccaagacttcaataatacgttcaacacttgcaattgatcttgtcaacatcaaaaagactgctgaaatcatcatcaatgaatttaagatttgcataacataacttaaaaatcctgttaattctccaactttcatagaacctttaagaatcatttgtcccccaaagaaaataatacaaataattgttaaatacataacatattgaaacaaaggcatattccaaacggaagtacgaaaagcatgttcactattttcctttaagttttcattaatcttattaaacttatcttcttcataaccttctcttacataagatttaacaactcttatagcatttaaattttcttgaacaactgtattcactttatcaatacttgattgcatcaaacgataaagaggtccaacttttcttacaataatgaataatccaacagctaatattggaataacaatcaaaaataccaatgctaaatttgcattaattgtaaaagtaaaaaataatgccatcaataacataaacggagatctaacaagtggtctaattccattactaatagctgtttgtaagacagtcacatcacttgttaaacgagtaatcaaagatgaagttgaaaaatgatcagtattcgcaaacgaaaaattctgaactttttgaaattcatcttttctaagttctgccccaaagccttgtccagccgttgctgcaaaacgcgcatacatgatacctaatatcaaagcaataactgcacacccaatcatcaatgctccttgacttataatataactcttatcaccactagctacccctttatcaataatatctgccattaaagcaggtataaccaattcaaaaacagtttctccaattacacaaagacaagctaaaattaaatattttttatattttttaatataaggtagtaaacgttttagcataatctcatccccctatcttaattctttccctgttagattaatatacatccttgataaatattctttaaattgttctctttcttgttcagtaaaaccatctaaagaaattttttctatttccaggcaatgttcactccacttttccaatgccgattctcctacaggtgtcaaacttaattgatatgcacgtttattttttggattgacttctctataaatcatgcctttatcttctaaactgttaagtattttactcactgttggtggttctacatcacattctatcgctatatcctttaacttacattcgctatgtgaagaaatatagcgtaatactttaggttgtcctggagccaaatcatattcattcatatttgctctagttttatttctttgtgcatgaaaaaccttaaataaaagaatatataatggtgttttcatctcttagcctccttttgttagcttactaattattagcatactaactataatactatatgtaaaagttgtcaagaaagtcacaaaaaaatcttgtatgatgtttcatttgcctgttaaaaatacgagtgatataatatatccggaaagaaggttgatacaatgagtaaagttgatattatatctggttttttaggtgctggaaaaacaacactaattaaaaaattaattaaagaaagtttaggaaatgaaaaagttgttttaattgaaaatgaatttggagaaattgggattgatggttcttttcttaaagatgctggtattgaaattacagaaatgaactctggatgtatttgttgttcattagtcggtgattttagtcaagctttagaaaaggttgtgaatgattatcatcctgatcgtattatcattgaaccatctggagttggaaaactttctgatgttattaaggcggtacaagatgttcaagacgaagaattacaattaaatagttttgtcacggttatcgatgcaaagaaatgtcgtatttatacaactaactttggtgaattctttaataatcaaattgaatatgcttctacagttattttaagtcgtactcaagatgttgatcaaaataagattcaacaagctattgatattattaaaggattgaacacaagtgcaaacatcatcacaacaccttgggatgaattaactggtgaaacaattatgaacgccattgaaaataaagattctcttaaagatattttgttaaaagaagctgatatctgtcctgtttgtggtcatcatcatgaacatgacgaacatcatcaccacgataaacattgtgaacacgaacaccatcatgaccatgaatgtagttgcgaacatgaacatcatgaacaccatcatcacgaacatgaccatgaatgtggatgtggacatgaccatcacgatcatcaccatcatcatgctgatgaagtctttacaagtatgggtaaagaaacaatcaagacgtataccaaagaacaattagaagatattttaaaaacactatcttcttcagaagaatttggagatatcttgcgtgcaaaaggtattttacctacacctgataaaacatggctgcattttgatttagttcctggtgaatatgaagtgcgtgttggtcctgctgactatactggtcgtatttgtgtgattggtaaagatttattagaaaataaaatttgtgaattgtttggagttgaataatgaaaacacgtatctatttatttactggctttttagacagtggaaaaacatcatttatcaatgatacaatcacaaccacagatttttgtgaaggtgaaaagtctttattgattgtcagtgagcaaggtgaagttgaatataatcaagaagaaatcgaagcatgtaactgtgatcttgtttatgtgaatagtgaagatgaatggacatatgaattctttgaagaattaaaaaacaaatacaatccaacccaagttttagttgaactcaatggaatgtttaatgtcaatcgtttcttagcatgtagtaaacctgatggatgggaagttgttcaagttttaacaactattaatgcacaaacatttggattatatattcaaaatatgcgttcattactttatcaacatgttgttcatacggatttattaatatttaatcgtattgatgaaactgttaaaaaatcatttttaagaaataatatcaaagcaattaattcaacttgtcaaatcatctatgaaaaagctgatggaaccgtcaatactatggatgatgatgaattaccatttgatatttctagtgatgaattaaatattttagatcatgattttggacttttctgtatggatgctttagatcatccagataaatacgcagggaaaacggtaactttaaaaggaaaatttattggtcgtgataaacagttagttgatggctttgtgattggacgtttggctatggtttgttgtgaagaagatacctctttaattggtatggtttgtgaacaccccgcagcaaaacagttaattccaaatgaatggattcaggtgaaaggaaaaatagaacttgattatgatcctgatattggtggagaagtttgtatattaaaagtggaagacttaaaagtcgttccacctttagaaaatgaatatgtgacatttgattagaggaccctgtcctcttttttattgttcatacctttttcttatcacatattgataaatgatataaataaagcataatataacaaataaacaaagatatgccacctttaatccaaacatatctccaatcaatcccatcaatggaaaataaataatcataataatactaaatcccattgacataagagaaagaagggttgcgcgcatctggctttctactttctcatttaagaaagttgttatggcaatatataagattgtctcaaaaaaagccataacacatattgataagatagaaagtggataaaatggtaaacctatagatgaaatcacaattccaattggtaataccaacaataatctcttttgtgaatatcttttcataactttataagtgattactcccgctataatacctgttatattttctaatgaaagaaatatagatattgctgaaatactgacacctaattctttccaataatttgttagatagtaataagctgttgttagtgatgctgaaaataaggcggtacttaatatcaaataaaagatttgatgatcttgtttgattaattcacaactcataacaacttgttgtttcatatcatgaaggatattagttttgatatatcctttatttttaatttctttcatctgtaataaagcaaatattgataatatgatgattaggatagataatccataagtcaattgataactcaatcccgcaataataccaccaatagtcgtcgataacaacatcgcaacttgaataaccacttccctttttccttgaattttagcaaattcatcttgttcattatattcaagcaataaatcataaacataagcactatcagttccagattctaagttatatgacaaagcttgtaaaataaacgataaataaatcatccattcttgtcttgcaaaaataagtaagataattgaaacaatctcaacaaatcttcctaataatcgacttaaacgtctcccatataaatcactaataattcctgttggcatttctccaagcatcgaagtaatatgaaagacactttcacaaattccaacatcaaccaacgaaaaacctttgattacaagaaatgttggccaaagtaaagatgttaatttaaagttcaataaaaactcaaatatataattcaaatacaaattctttttcattattattaatccccttttcttttgtttttggggaacaaaaaaagattccatacaaatggaaccttctatttcattataaacatggttcccctattttgggcgcactcgtcccttgtttagaaaaccatcaaaaaatgttatagtgtgacaccatgcatcatgatataaaattgtatttctttgttgattgataaacatgtgtcccacctccctatgtttataatattatcattgataaagtcttgtgtaaagttatttatcatttttaaatatatattttcttatcaagacaaagataataaaactcattagcaatgaaagaaaagttggtaaataaaacaacaaaatactgctcatacttccatcaatcaattgatgaagtttgttataaatcaattgataagtcattgtatattcactcatataaaaaataggtataaaacataataaccatatatttatactaaagaattttctttgatacttttgttgatgtgtaggtaaagcaaatatttcaaatataattatacctataatttgaatcaacatccctactaataaacaaatcgaattttgataatgtttccataacatatatgcacttaacaatcctataaaaacaatgcatgtagaaataacaatcattaaatctatacgattttccttggtatcattttcaatagaatcttttaataaataatctgtactcacatgataaatttcacttaacgctaatatatttgaaatatcaggaacactttcatttaactcccatttagaaactgattgtcttgaaacattgagttgatcagctaattcttgttgagacaatccactttgttttcttaactttaataatttttcacttagattcataaccctacctccttgcatcattataccaaaacccatgatggcttgctacatagtcaacttggcaatggcgcccgtaagagttgcaactataaaaagaagtctatcaagcaatattttattttctttttgcaaattattgacatttattataaaactatttataatcccatctttgacaatttataagcaataaaagtcctgaacccaatgtgtataaagggtttcaggactttttggttctgtaacgaatatgcgtaaattattatttctttgtattttttataatatttctcattttctttttgcttgtaatttcataatcggttctaaatccaaacttataatgcagctcatcggttaattgtgttcttgtgtatgctggaatatatccgttatactgtgtgtcaaccaattccatccctctaattgtctttaatatttctgtagctgtatatttattgtctaatatattagccaataagcgatagatgatgagtgacataaagcacgttagaaagtgtgcttctatcctttcttgtttttgtaagtgtactggtcttgccttaaaatcagttttcatgattctaaaacattcttctatttgccatctttcctctgaaacattgataatggcttggatatcatcatcttctagattagtagatactgcatagaaaccatcgtacattgcttcattatctatcttctcttgatttaaatgatagtattcttcaacagcgactccgttttcatcagtcgttattttttctataaatctggatggatcgttaggattacgtgttcctttttttaattttccgttagaacgtatcttattcatcgctctttggacttgcttatctctaatcttcttttgataaatagcatatttaggtgaatatgtaataatcaatcgttccttgataggagattctataggcaattctttatagaatactctattaagattatcttcacaattaaattcaatatcatcaatattgattcttttagaactcttacttcccagttctaaaaatcccgtatgtctaagtgcgacttcacgatcatctttctttaatttttttaaagattgtgtaatgatataagctctattctgtatactattaaattgtttattcgtttgtgacgctaaaccgctgtcactgcagtaaacaaattgacctaattgaaaatccttaacgattctttcttcaagtggctttaatgtgacttgttcgttcttgtttccttcatataaatcaaaagccaagggtataccatcaccatccatcattaatcccatacctacgataggattaggtctgttttccttgcctttaccatacattctaaatccatcatcttcttcaatttcaaaataataatttgtacagtcataatatagcttactgccatctctcttcttaatgtaatttgtattcctgtaaagttcagattgtatatagtctgtttccttagaaagaatagataatgcacgataaatatcatgtaattcatatttaggcttttctaataaggtagaagcaaattcataactagaccgtttactgctgggacatagaatcctagaatagattagatccgataagattgcatccaaatcatatttgaacttatatcttgctttaatgtttctacatatattgttgatttttaacttgtaataaatatcttgcagaaatagataaccgcaattatacttacgattactgtttggcttaataattctatcaggggagaaagcaatgatagtatcatgattatcatccttttctttttgagtaagttctttggcgtattgtttagcccaaatgatcaattcatcacgagacatattcttttctttacataagtcatctatcttacctaacttttcgtatgtctttgaagtacgtgaaccgttagaatatatatctttgataatataaataaattcatagttttttgatttactgatactcactctcataatatagcctccaatacttataattccattatatcatatattacgatgaattacgatataaaagtaataaaaagttgacaaaaaaataaagcatctatcaatgctttttgaattatacacatatctaactgtcaaagacccgaaactgattgtcttgaaacattgagttgatcagctaattcttgttgagacaatccactttgttttcttaactttaataatttttcacttagattcataaccctacctccttgcatcattataccaaaacccatgatggcttgctacatagtcaacttggcaatggcgcccgtaagagttgcaactataaaaagaagtctatcaagcaatattttattttctttttgcaaattattgacatttattataaaactatttataatgagaatgtaaaaggtattaccgatagacggtgtcctaagatttaggtgtttaaaataaccgcaatccttggctaggggcggttatttttttgacttcttgataatctcaagaaataatacaatgataatattaagaatcattaacataatcgttaagatttcaaaatcactcattatatcacctcccgtttttatatttcttcttaagaagatatctattgaaacgagatgtctcagtccctcgatcatactgactcaggacaccgcctaccgttatggtaatactatagttagtatatcataaaattaactttaagcaaatattttatttgaataaaatttgaacttagtcatactttcatgtataatggtgggtggctaaaaagaggtgaaaaaatggaaggtttttggtatgaattaaaacatgtatgtaaacaatctggagcaagatatgggattttacacactcctcatggagatgtagaaacacctatgtttatgcctgtaggaacactagcaactgtaaaaggaatttctcctgaacaattaaaggaaatgaactctcaagtgattctagcaaatacatatcatttatggttacgtcctggtgaagatgttgtaaaacaggctggtggtttacataaatttatgaattatgatggacctatcttaacagatagtggaggttttcaagtcttttcacttggaaagacaagaaagattgaagaagaaggcgtgacttttaaaagtattgttgatggtaagaaattattcttatctcctgaaaaagctattcagattcaaaatgatttaggtgctgatattattatgagttttgatgaatgtgcaccttatccatgtactcatgattatatgaaacaaagtgtggaaagaactttacgttgggcaaaacgtggaaaagatgctcatcaaagagatgatcaagctttatttggaattgttcaaggtggagaatatgaagatttaagagaattgagtgctaaggaattagtaaaaatggatttccctggatattcaattgggggaacaagtgttggtgaacctaaagatgttatgtataaaatgattgatgatgcgatcaaatggttaccagaagataaaccaagatatttaatgggtgttggaaatcctattgatttaattgaaggagcaatccgaggaattgatatgtttgactgtgttttaccaacaagagtcgcacgacatggagcattaatgactcactctggtcgtatgaatatcaataatgaaaagtataaatatgactttactcctattgatgataaatgtcattgttatacttgtcgcaattacacacgtgcttatttaagacatttgcataagtgtgatgaaatttttggaaaaagtttactctctattcataatgttgcgttcttattacaattaagtgaagatataagaacagcgattaaagaagatcgtttattagattttaaagaagaatttttaaatagttatggtagagacgtttatgaaagggcgttttaatatgaaattaagtgaatttgattatcatttacctgaagaattaattgcgcaaactcccttacaaaagagagatacttctcgtttaatggtactagatagaaagaatcaaacaattgaagataaacatttctatgatatcttagattatttacatgaaggagatatcctggttagaaataataccaaggttattcctgccagactttatggaacaaaagaagaaacaaatggtcatgttgaagtcttattgttaaaagacttaggaaatgatgtctgggaatgtttagttggtaatgcaagaatagtgaaaatggatactgtcattacttttggagatggttctttaaaagcaaaatgtgttcatattggtgaagaaggaattcgtcattttcaaatgatttatgatggcattttttatgaaatcttagataagcttggaacaatgcctttaccaccttatatcaaagaaaaactagaagatcaaaatcgttatcaaacagtctatgccaagattgaaggaagtgccgctgcaccaacagctgggttacactttactgatgaaatcttagaaaaagtcaaagcgaaaggggttaaaatattagatgtcactttacatgttggacttggtacttttagacctgttaaagttgatgatgttttagaacatcatatgcatagtgagttttatatgattgatgaagatgttgcaaaacaattaaatgaagccaaagcgaatggacaacgtattattagtgttggaacaacttcaacaagaacacttgaagcaaacttcaaaaaatatggagaatttaaagcgactcaagaaagcactgatatctttatttatccaggatatcaatttgaagctattgatgctttaattacaaatttccatttacctaaatcaacacttgtcatgttagttagtgcttttgcaagtaaagactttattatgaaggcttatcatcatgctgtggaagaaaaatatcgtttcttctcatttggtgatgcgatgtttattcaataatgaaaatcaattatgatttaaagcttcaagaagaattaaaaaagattggtgatacaaaaccatctttattacttcatgtttgttgtggaccttgttcaagtaatgtcattaaagaattgtgtgaacattttcaaattaccatttattattctaattctaatatctatcctagtgatgaatatcaaagaagatttcaagaattacttcattttattgaaagatttaatcaggattttcatcaagatattcaagtcatagaagacccttataattttagtgaatggttaagtcatatgtatccactcaaagaacttcctgaaggaagtatgagatgtcgtttatgttatagtttaagaatgcgtagaacatttgattatgcaaaaatccatcattatgattattggacaactgtattaagtgtttcaccacataagaatagtcaatggattaatgaaattggagatgcttggcaaagcgattcaccaaaatttctatatgctgattttaagaaaaacaatggttatttaaaatcaactcaaatgaccaaagaatatgaaatgtatcgacaaaattattgtggttgtatgtttagttatgaagaaatgttaaagcgagaaagtcaaaaataactttctcgcttttttctattttcctaattctttacttttatctgtataagatgtatgtaacatttcttctgccaaatcactcattggttcttggtagaactctgcatataattgtttgatttcgggattttcatgactctttcttaatgtcatggattggtctctattatataatccagcaatacgttttgcacgtaagatgtctccttgatattttgtatcttttggttgaccaccgccaccaatacatccccctggacaagtcatcacttcaataaagtgatattgtttatcaccgtttttcattttttcaataaattcacttgcattctttgttccaaagataaccgcaatattcacagtcattccattaatttctacacttgcttctttgacatcatctagtcctctaactggagtataattcaacaaatcagccggagcactttgaccagtcataatttcataagccgtacgcaaagcagcttccataacaccaccagagttaccaaaaataacaccagctccactagcttcgcccatcaaaggatcaaatgaagaatcttctaatgaggcaaaatcaatattttcttcttttgcccattttgccagttctcttgttgtgatgacataatccatatcacgcataccttcaatacctaagtattttcctgcatcgcacatttcttcacgtctgatttcatattttttagctgtacatggtgtcactgcaacattcacaatctttgttggatctaagttcatctttttagcaaagtatgttttgaccgttggtccttgcataccaattggactctttgcagttgaaagattatcacgcatatcaggatgatagatttctaaatatttcacccatgctggacaacaacttgtaaactgtggcaatggttttgtttgttttgttaatcttctaatcaattctgttccttcttcaagaattgttaaatcagctgagaagttagtatccaaaacatatcttgcacctaattttctaagaagtgctaccatctttccttcaacaaatgagccatctgccatcccaaactcctcacctaaagcaattcttactgatggtgaagtattgaaaataataattttatcaggatctttcatttcttcttgaatcaattgatattcatatgtttcatgaatacttgaaacaggacaaacattagcacattgtccacagttgatacaaacagctttatctcctgttttttctaaagtatatgttccatgaacaccaatataatcttgacaaatatttttacattgaccacacttaatacatttttcttcatctctttgaattgatggattatcacattcaattggtacacgtatatccattcctaaatgcttactcataattattctcctttttattagtaatcgttactattattatagcattatgtaaaatattgtcaaattaaaaagagaaacaccaataaatgcttctctaatctctaattttttcaataaattcttttattttttgtgtagcaacttttaactcgtcaatactataagcataagatacacggacaaatccttcacccgctggtccaaatgctgtaccaggtacacaagcgaccttttgatcttctaatagtttttcacaaaattcatcagaagttagacctgtagatttaatacagggaaaaacatagaatgctccttgtggtttgaatgtttcaagtcccatatcattaaatgtttttactaagaaatttcttcttgctttatatgaatcacgcattctttctacttcttcttgacaatgtcttaatccttcaatagctccatattgagcaggtgatggtgcagacataataacatattgatgaattttattcatcgctttcgttaaaattggatttgcgagaatatatcctaaacgccatcccgtcatagcaaacgccttagaaaaaccacttacaacaatcacttgatctttgatttcatcaaatgcagcaattgaacaaaattcttcttcataacttaattcagcatagatttcatcggataaaacaataattcctgattctttaataattggtacaatcttagcataatcttctcttgtcataaatccacctgttggatttgatggatagtttaacaagattgcttttgttcgaggagtaattgctgcttttaataattctggtgttaacttgaattgatcttcatgtcttaattgaatagaaactggtactccaccagctaattcaactcctggtgtataagcaacatacccaggatctaaaactatcatttcttcaccaggatttagaattgctctaatcgcaatatcaatcccctcagaaccacctacggtcacaatacaattctctttaggatcatatgatactccaaaacgacgtttataatatttgcatatttcttctctaagttcaattaatccttgattagcagtatagaaagttctccctttttcaattgaatagatagctgcttctctaattgaccaaggtgttgtaaaatcaggttctccaacccctaatgaaataacatcatccatttgtgatgccaaatcaaaaaacttacgaatcccacttggtttaattgtttttacacgttcacttaacatatcatcataattcattatggagtcaccaccaatctatcattttgaccatcttcatcctcaattaagataactccatcatttttatattgttttaatacaaaataagtagatgttccactaaccccatctaaacaagctaacttacttgcaacaaagtgtgcaacctcttgcattgtttttcctttaacaatagcaacaaattcaaaactaccacttaataaatacattgtatcaatttcatcatatttataaatacgacttgcaatacgatcatatccatattctctttcaggacttgcattgatttgaatcaatgcagttaccatttccgtatttgttaaatcccaattaataattgtatgatacccacaaataaccttttgtctttctaaatcacttaacttttcaatgacatcatcttcagtttcatctaaggcggccgctaggtcagtaattttcatcctcgcatttctttgtaacaaacttaataataacttatcttccataacgcttcctccttttatattatatttattgtaatacatttttatcctttagaaaagatttattttatttatcacaataaactattcttataaattatataaaattcatttatcaattattagtaaatacaatacgattgtgctaaaatagatttatgaaaggggtttaaattatgaaaacattttatgtatcaagttatggaaaaaatgatgataagggtatttatattatgaaatttgatgaacagactttagaaatgaaaagaattcaacaaattgtaacacaagactacccttcatatatgattattgatgatcatgttttgtatgttgcttataaaaatgcgagttcacacagtgatggtggtggattaggaagtttttctatttataatgatgagttgattttaaataataattatagttctagcggtcgttcttatacacatctttgcgttgatgatcaacaacgctatatatttgctgctaactatcatgttggagcaaccgcttcttatcagttagaaaataaaacaattaccaaaaagatttgtgctgttcaccataaaggtctcggtcctgatttattaaagcgtcaaactggtcctcatgctcattgtgttggtattaccccagataaacaatttgtttattcagtcgatttaggagccgataaagtcgttatgtatcgttataatcaaggtattcttttagaagatactgactatactttaaatgttcttcctggttctggacctcgtcatatgattttttctaaagatggacgttttgcctatctcgttaatgaaattgctaataatattatggtctttaaatataatgaaggacgttttaatttgatacaagctattcattgtgttcctagacattttaaaggtttttcaagtgcttctgcaattcgtttaacatcaagtggtgaccatttgtttgtttcaaatcgtggacatgatagtattgctatgtatcgtgtcaataaagaaagtggaaagatttcattattatatatggttcatacgggtaaaggtcctcgtgattttaatattattgatgatcaatatttgattgtaggttgccaagaggataatattttacaggttttaacttttgatgaacctaatgaaaagttattattaagtgattcttctattgaattacctgcccctgtttgtattgcagtggaaagataagaaaaaatgacaatgttcgcattgtcattttatttttctcacaggaaattgaatctctgttaaccattcatctggtgtttctttattccatattccatctatataagattctctttgatatccaacaatttcataaccactttcttcaataaaatgtataattgcactatatgctttaggtaaagtttcatagggtcctttatgtaatacacatgcagccatttccacctcaggtaaaacactaaactttaatgtttcagtatcttcttttagttctgtaacagcttcacatatttgggcatcaatatctgattcacgatattcaccatcataataaattgtaaagcaatattcaggaattgcacattcacatccttgttgttccatttccattcccatcttaggcattttatcaaataattctggataaccatttaaatgaacacgcatagaagcaataataacttccgggattgatttaataacaacatgatattcattttgtagttcatcgcttgttagataactttcaatacttgctattttctttgttatttcagccatctctaacatgagttgacttttcttcttttgcaatattttttcttctgaagctcctgcaataacttgtttaatttcttctaatgagaacccaatttcttttaaagcaagaatttgatgaagaatgggtaattgatctgagatataataacgatagccattgttttcatctatataatatggtttaagtataccaatttcatcatagtgtcttaatgttttaatggttactttattcatttgagcaaagattccaattttatataacttttgtggttctctttcacattgatattgattttccatcattttcacctctattcccattgaaatgtctttaatgaaattatacacccaataattgccatcaccaataaatatataatagagtaaatcatatcctgatgataaattcctaatgagatatcttttaataaagaaataccttgagttaatggcaagactttagcaagattttgtatgaattgaggaaatatctcaaaaggaattgttgcccctgaaagaaataacattggaaagtaaacaaatgtacaaactacatttgcaacttttaaatttggacatagactggcaataatcattcccaaactatacatagaaacaagaatcaaacaataagctagaataaaatataatatactaccttccatttgataatgaaatatgacaatcgcacatattgatacaagcagagctgataaaatagaaataattgccccaatacaaaattgtacacatagaattaattttggactcattggtgtcacaaagaaatgttttaatatcttcttatctcgataatttgcaattgttaaggggatacccataaatgctgttgcacatattcctactgttattagtgatgcaaatgcactttgtaaaaaggtataattctcttgagaaattgtttgttgtccagcaataagcccaatcattaataagactcctactggcatacctattccaaatattaatccatctggacaacgtaaacttaatctttgttctatttttagtaatgtcataaatcgtttcattgtttttcctccattaatgttaaatacgcttcttctaaattttgataaggtccagattgcataatatcattaactgttccttcaacaacctttttcccttgttttaacaataaaatacgatcacataaatactgtgcttcttccatataatgtgttgttaaaacaatagtcattcctttttcttttaaattctttaatatattccatacctcacgtctagcaacaacatctaaccccgttgttaattcatctaaaaagatgatttcaggttgagggattaaagcaacaacaagtgataatttttgtttttctccaccggataattgatcaacatattgatttttaaaagtatccaattgaaattggtgaagtaactgatgataatcagctggattttgatataacgctgcaatttcttcacatacctcaataactttaatgttatcttgataataacttgcctgtaactgaacccctattatttcaaaaagtgtttttctttcttttcttgcatttttaccaaaaataagtgcatatccacaatctggttgatttaaacctaaaatactttcaattgtggttgtttttcctgctccattatgacctaaaataccataaacctctccaacattgacatcaaatgaaagttgatcaacaacttttctagcctcaaatatctttgttaaatctttaacctctatacatttatccatgttcttttcctcctaaatatagcttaaatgctcctgtaagaggacagtcaagaaaaaagtgaaaagtttttttattcaactttccactaactataaaacctatttatttcatattccaacaatgatttaatggtccactaccatgacctaaatctagattatcctttaaagctccaataatatattcctttgctttttttacacttgtaacgatatcataacccaatgccaaatgactagcaattgcactcgataaagtacatccactaccatgggtattaggattatcaatgtgttcacattctaaccatatcacttcatctgcatggtataataaatcatctgcacattcttcaaagtgcccacctttaattaatatatatccttgataccattcacttatttcttttgctgctttgagcatatcagctttgttttgaataggatgattaacaagaacttcggcttctggaatattgggtgtaatgatactagataaagggattaattcttgttttaaagctgttaaagcactatcttctaataaacgtgaaccgcttgttgataccatgactggatcaacaacaatatttttagcatcatatttctttaattgttctacaattttatgtattaattgagtttcagataccattcctattttaatcgcatcgggatatatatcttcaaagacacaggcaaactgttcttctaaaaactgtggagtaacattcataatatctttaacacctagtgtattttgagcaactaatgctgttataatactcattccataaaccttatgtgctgtgaatgtctttaaatctgcttgatctcctgctccacccgttgggtctgttcctgcaattgttaatactgttttcatcttatacctccatctcatcaaatgacatataattttgattggcaatttgacagatttttgaccaatcgttatcattatttttatcatatatagcttttacatataaaccagcttgtttagctgattgaattgcatacaatgcatcttccacaacaatacaatcatcaattttataaccaatatcatcaattaaatgtaaataactttcagattggttttttgtataaccataatcatcgcaagaataaatagcttgaaaatattgatcaatctttaatctttttaaggctaacttcgctaataataaatcacttgcggtaaaaatatacatttttatatgttgttttaaacatttttctaaaaatgtttgaacacctggcttaagtaaaacatggtacatatattggtctttgatttgagtacatactccttctttaatttcatcaatattctgctttaaatcaaaatgaactttcatataatgagctgcttcctcaattgtcatatttgaaacctgctcatctaaatcattgctaccttgtacattgatcgtctttaaatacttatttccaatattgtcccaagcattcaaagaatctaataaagttccatctaaatcaaatatatatacttttttcataacaaaagttcctttgttttttctttaagttgctttgttgcttcgataatatcttcggcagccataatagcactcacaactgctattccatcaataccactaccttttagttgtagtagattttcttgatttattcctccaatcgcaacaattggaatatcaacatgttgacaaatgtcttgaagtgtaatcaaatccacctcaattgcatcatcttttgttccggtaggaaaaacagctccgacacctaaataatcagcacctgcattttgagctgttattgcctgttcaacagtttgaacagaaacgcctaatactttatctaatccaatcaactttcttacatcctgtgcctgcatatcactttgaccaacatgaatcccatcagcatctacttctaacatgacttcaacatcatcgttaatgatcaaaggaatttgattttgattacataattctttcaattcctttgcttcttgaacaaacaattgacgatttaaatgtttttctcttaattgaacacatgttacaccaccatttattgctgcctcaacatcttcatataaactatgagcttttaaccaatgtcgatcagtaaccaaataaagctgcattgctttttttattttatctttcttcaatttttattcctccatttaatttttcagctgtcatagtacttaaagcatcaataagataaactcttaaacttcctgttcctgcatcttgttgttgtactttttgttgggccaactctccactataccccatcaaagcaactgcacaactcacggcatcaaacatagaatcttgattcactgatacataggctcctaatatggcacttaacatacatccagttccggtaatacgtgacatattagaacaaccatttcttataatagtcgcatggttggcatcagcaattatatcaattgctcccgtaatggcgataatagcacctgtcctttgacttaattctctagcaaaatcaattgtttcatcaagattttcttcattaacaatatcattgatatcagcatcaacacccttggttgttccaataccttgataaactgtttttatctcagaaatatttcctcgtatcacactgaattgtattttatctaataaccgaaatgttgtctcactgcgaaatgaacttgctcctgctcctaccggatctaaaataaccggatgattcaaagcattggccttctgtcctgcttttatcatagcttctacagttctttcatttaaagttccaatattaatcactaaggcttggcatatagatgtaatatcttccacttctttaatttcatcagccataattggacttccatgaactgctaatatagcattagcacaatcattcattgttactgaattggttatacaatgtactaaaggtttttgaatctttacattattcattattttttcaaacatattactcctccatcaacaaaaaagtgatatgccatgtatggtatatcacttcacaaaatccaagttcctatccctacgttggcattacccaaatcaggtgcggtcgaagttcacaacttcctctcagcctatatataagctcccgttcttgatatatttattataatctttcctaacaaactcgtcaatgtcattcaatacatagatatcattatgataatatcttttcaatatactgttgatgttgagattctggtatatctagtaaatccattacctcatcaattgtataactatgcttcgtgattaacttctttatgaattcaatcgttttattcatctctccctcagcatatcctttaatttcaccatatttttctccttcaatgtaaccttcatctcttatcttctgccagatttcacacatctctctctttcctccttcactctctttgtaataccctacctgtttcttcaacacttcataattcatactctcaacttctttgcacataaagtcatgcatcagtctccctagctcactatcatcctgtattgatgcattcacatagatgatttctgtttcatcatcaaagctctctccattttcaacaatccttcttctcacatgatagataggtagatcatatcccaatacatcttcctccgttatgaatataacgattgtctttggaatctctctccatttttcatttggatagcttagaaatgaatcaatcagactctgatgataccttgcccgcttgggatggcgcctgcttcatctctctgtacttcgatattgatataatgccctttgttgtctttaaccaatacatcaattgtcagtgacctgccaaggagattcttaaggtcatactgggaatcattctcaatgatttccacatgctcatcaaggatgatatccaagaggagctgaatacaatcctgattcttgaagatgattctcataaagtcatcatcaatcagcctaagtgaggcaatgagatcatcataggccaaacttttttctagaacacttgtagtcatagaacaccttctttctagggaaggatctatcatacaaagattatacagcaatatttgcttatagtaaatagatataaaaaaacataaaaagagtccttaagattatatgtactaaaaaaccttccctattacttatatacgcaaaaaaattcaatttttctttttatttttgaaaaaaaagaaatagaattgttctatttcttcattcgaattgtatatatcacttcatcttctaattcttgtgtatcagcaatcacttctacacccgcttgttctaccatttgaattgcttgttcgattgtattcatcgcaatttttaagttttgagaaatactctttgtttttgcttttggttttttaggttcaatcttactcttgattttctgttcagtttgttcaacatttaaacctttatccataatttctcttaacatattattttgtttggctgttgtatcaagttttaacaaagctctggcatgacgttctgtaatatctctacgtcttactgcttcttgaacagtcattggtaattgtaatagtcttaatttattagcaattgttgattgttttttaccaactttttgagctaattgttcctgagttagattttgtgtatctaataattgttgataagctaaagcttcttcaataggagataaattttctctttgaatattttcaacaatagctgctgtagcagtctgcttttcatcaagctcttgaacaagacaaggaacttcttgtaaacctgctaatttacatgctcgaaatcttctttctcctacaacaatttgatattttccttgatatggtcttactacaataggttgcaataaaccattttgttgaatagaaacagacaattcctgaatcttttctttttcaaaatgtgttcttggttgtttttcattcgcttcaagcttattaatatcaataaatttatacattggttctttcacaaacttcactccctctacaatacgtttcatattataacatttttcctatcaaaacaaaagaattgtttcattgtagaaaaataaaaagaaggaataatctccttctataaatcacagattcctgttccttctccatacattgcataccagtcactattgaaatcatcaacagctttttcaatgcttggatttttaaagattgtctttaatacatctactggtgctgtaatcgcatgtgccccataattcaatgaatctctcacttgttgaacacccttgaaacttgctgctataatcttacaatcataaccatccattgtaatacgagaagataattcattaattaattccattggatcacttcctaagtttccaattctattgacatatggtgcaatataatctgctcctgctgctaaagccatataagcttgcattaaatcataaactgcagttgcagtgacatgaacaccttcactctttaagattttaattgctttaactccctcataagaaactggtactttaatataaatttgatcatcaatttctgctaaaatacgatgagcttctttaacgattgtttcacaatctttagaaataacttggatatgtaagcttctatccattccaataatacttctaatttcacgcatatgttcaaagaagttctttggacttgtttttttaacaattgatggattgcttgtcactcctacaattggcatgtgatctactgcatctttaatttcttctaagtctactgtgtcaataataaattccattttccttttctcctattcaataattaaattttttaaacctgtagaataaacaatgtcatagaaatgttgcatttctttcttattaaacatttgatattctcctaatccatattctaaatcaactaatgaatattttgatgaagccaatggattataatttaataattcatatttaacttcactatctatattcactaagaatttagcaatggatattatattgttatcagttgcactcattaaaggaatcaatggtgttctgataataaccttgtttttatgttcactttctaatatatattgtatatgattttttatctttaaggaagatactcctgtatattcttgatgttttttctcatcaaagattttaaaatcagcatagattaaatctaaataaggtaaggcttgttgtaacaagtctaatgatgtatataaagatgtttctatcgcagtatggattccttcttctttacatcttttgagtatttcaattaagaacgttccttgcataaaaggttctccacctgagaaagtaacacctccaccatttctaaagaaaacttcatcagctttaattttttcaataagttcttcaatatcatattcttgactatcataacgaatggcagaagctggacaggcttttatcaaattatcaaaatcaccttggtattccaaattgaaataaggtcgattattttgatatgtcatttgatcagcttttgcaaattgttcacaacgacgacaatgaatacaactattttcaaaataaattggacgacgtttaggtgaaagtccttccggattttgacaccattgacaacgcaaaggacagcctttaaagaaaactgttgttcgtaatccatgaccatcatgaacagcgaatcgtttgatatcaaataccaatgctttagatatcttcatatgctgttctcgcaatgatttcatcttgaagttttcctgccaattcaacgaaatatgctgtatatcctgctacacgaattgttagtgaacgatgacgttctggatgggctttggcatctaataaatcttctcgtctaacaacattgaattgaatatgaggaacttctaaatcgacaaaagctcgtaagaaggattcgaacttgttcattcctgcttctgttttaaagaattctggtaagaatttcatatttaataatccaccatttgtcgtgagtgagttattcaatctagagactgattttaagacagcagttggacctgataaatcacgtccataaaccggtgacatgcctccatcagctaaaggtgttaaagcatttcttccatctggtgaagctccgacattctcacccattggtacatgggcagaaacagtatacatacctgtatgataaggacctccacgataatttgtataatctttcattctttctctaaaatactcagcccacttagcacccatttgatcaacccaggcaatatcatttccatactttggtgctttattcaacaacattgtttgtgtaatttcatgacctttaaaatcatcttgtaaagcagttaaaagttcatgtcttgaaatcattttttcatcatatacaagttctttaatcgcagacaaagaatcagctaagtttgcaatttgaatcatttgtattcctgataaattatatttagctcctccacgtgtcacatcgattcctttctctaaacaatcatcaatgacagtagataggaatgctgtaggtaaacaatcttgatgagctttttcaacaacaatttctgctttcatcattctttcaataaaatgatcaatttgttgctggaaagctttttctaaatcttcaaatgtttcatatgtttctaagcttcctaaatctaaaccaatttgttcacctgttagtaaacattttccatgatttaaagttaattcaagtgctttgttgaagttaaacattgcagcatcactccaacctaagttattaccatgagttgttaattcaacacaaccgacaattgcataattgagcgcatcttttctttcaatacctaaatctttcgtcattgttttaacaattgcttcatcattaaagaattgtggcattccacttcccttagcaacaacttcaatagctgcctgcatcaattcatgagaagaatttttatttaatctcactgataaattaggttgaggtaaaccaagatgatattgagcttttaaacaaagtagtgacaattcattataagtatcattaccaaattcatctagtcctcctaaagcaatattaaaaccaattgggaaacctgcaaaatatttagcactatgttgatttcttaaataaacaatttcattaaattttaaccataaacattctaataattctaaagcatattgatcatcaatcaatccttttgctttatctctttgataataaggatataagtattgatccattcttcctggtgagaaagatgatgcattagattccatatgcaatatcacaaataagaaccataaggattgaatggcttcatgaaatgtcacaggtggtctttttgataaattcaaacaattatcagctacagtctgtaatgatttttgaagtgctggttcaacactaggaatcatttcttcaatataatcatgatatcttttcataaatgtacaagccccttctagaacaatgattgtacattcataaaattctctttgactctcatcacatgtttttaacttctctttggctttttccattaacccttgaggacctaatcttaaccaaagtgcagaatccggacaaatatgcccttgagcatgatctttttgattaatctttacaaccttagcaatcgcattaatttcttcaccataattttgtttaatcacatcttccatagaatgaccttgccaataaggataaatagattccctaaattccttaatatcttcatctttgactaaaaattgatcttgaggtctagttggaagtgtctcaaattcttgattaatccatgaacatccactttcaggaaaaaccacaccataacgaacaccctttgtacgatttcctacaattaattcttctttttctacaccaatttccatttcttctaaagctgcacgtaatgataaagctctttttttaggaactgacaaattttcattttctttgtaaacacgggtaatgatacgagcttgttcaattgatgcataacgtggattagataacatcttttcttttaataactcaattctttttgtttgatataaattatccataagttcctcctatctaataatcaatccatattcttctaatatttcttttcttttgtttgacaactctttagaaacaatgagaccactaatatcatttaaagaagcaaaaatataattaccatcttcttttaactttctttcctcacataaaagataactcttttgactttgttcaatcacactttttttcatcataccatcatcaatatgataagtagaaagtttcccattaactgtatcaaccccaacaacacctaaaaatgatttatcaatcttaaataattttaccatttctaacgctaaggttccccaaaaaccatcaccttcttgattcaattgtccaccaataaatatcattgcaatatgttgacaatgattaaggatattaagtacatcaatcatattcgtaatcactgtaacttgtaacgtggattctcttaacaatttagcaatttcaagacttgtcaaagaaacatctaaaaagatcgtatcttgattttcaatcagttcaaaagcctttttacctatcacaattctttcatcattaggagttttcttacgatcttcactattatacaaatgcggatttaaacgcacactcactgctcctccataagcttttttcaacaatccttttttctctaacaaagccaaatctttacgaatacaatcttctgtcacttcaaactttaaacttaaatctttgactcgaacactaccttctgcattgacttgagaaacaatactttcttgacgttcttgcgcaaacacaaccatcactcctttcgtattatttattattgtttattattacttcatctttattataagtcattatccttaaaaatcaagacttatttcaataataaacaataaaaagatgagattatttcccatctttcttatactttctaccaattggtagaacacaatcatgtaataatacaatttcattggattttgtttctttaatcatcaatttattgacaatataactcttatgaatctgtataaattgatttctatttaagagatttataacatgattaagttgatctctaactttatattctccactctttgtgtgaatgataagataatgtccataagattctatataaataatttgactactttttatttgaatataagaatatcccattttaaacgttaatatttgttcaatatttgcataaacatctaagattaattcaatcacacgttgtaaatcttctgtcaaatgttgttttcttataaaagataatggatattgtcctaatgcaagaaaagcatagtctgatttatcaataataaatatgcatgtgtgttgaggacattgtttgtttttaaaataaatgaaatctttttcttcttttatttctttaaatataatgattggtttttgaatatgttgataagttgtttgtttaaattgaataaaagcttgttgtaaatgagattcaatacattctttgatttgttgatcttgaatatcaataattatattaatgttcatgtttattcaccatttcaacatattcagcaaatctcattgtccgatcttttaatgcttcaattaaatgataagggtcacaaacaacaaccccttgtttcatgataaactctatacccgctaaacaattctcttttttaaaataaagattatctggttggatgctcactaatgaaccatcttttaaagttatattaaagattatagaatgtcctttctgattccataacatgtaaacattgctataggataaagttatttcttttatatcgtctaatggaatctgaatatcatagacttgttcacgctgtaagatatttcttatcacctgctggtatttagctagtaacccttgtgaactacaatatttaaaataatgctcatcaacaacaataaattgcctatctccataaatagcagatgcaattataataattattgtaaacatacttaatataaatatcctaacatcgtttctaattgatgcattatcttttaaaaacggaaaagacacaatctgattaatcatcataactgcaaaaaaataaatacctggaatactcaaaatagcttcaatcataatcctttttctactaaccaactgtcctatcatgacttcttttttcattttattcaccccttacaatgacattatagcttatctttaacaaataaaaacccctttgtcctaagtcaccttttcatatcctcaacaacaaaaatagacgagttatctcgtctataatggcttctttttgatttttccaaatgatcttggataagtcttaggtgtattcttaactttatgaataaagatattagaacgatgatcattctcatcagtcaatgtaaaatcaacttccttcataaccattccacctaatttttcaattccatttttagcttcacttaattcttctttagcttttaaacctttcagtgtaatgaaatcaccatctaatttaaccaatggtaaacataattcatctaaaatatttaatcttgcgactgctcttgcagtgacaatatcaaatgattcacgatggtcaatagcgtattcttcagctcgtgcactgattgccttgacattgttaagttctaaaacttttattaaatgatttaaaaatgtaatacgttttgtaagtgaatcaacgattgttatttttaaatctggataaacaatctttaatgggatagaaggaaaaccagcaccagctccaatatcacatagagattggttatttaagatataatcaaaggaaattgttaatgaatcatagaaatgttttaaataaacatcttctttattggtaattgctgtgagattcattttttcattccattcaattaatgtttcataatataattcaaattgttttaattgtttatttgataattgtatacctttatctgctaaggcttttaagaattgttcttgattcatatatacctcttaataatgttgttttaagtaaataagtaagaccgaaatatccgctggattaattcctgaaatacgcgatgcttgagctattgttataggtttaatttgagataatttttgttttgcttctaatgataagtttaagacatcatcataattaatatcacttggaatttgtttttcttccattttcttaactttttctacttgtctttgtgccttatcaatatatcctttatatttaattaaaattgtaacacgtttttcttcttctggagttaaagttgtttcaccaataaatggttttaatttttgataatccatttctggtctttgtaacaaagcttttgcactaattccttcacttaaacgagaagaacctaatgcttctaaaacatcattaacctcactctttggggtaaaacgaatactttctaaacgttcaatctcatcatgaatatgatccattttatctaaataagcttgataaacttcatcactgacaagatgtgcatcatgtccatatgttcttaaacgttcatcggcattatcatgacgcaataataaacgatattctgcacgtgatgtcaacatacgataaggttctttggttcctttggttaccaaatcatcaatcataacaccaatataagcttcattacgttttaaaactaatggatcctcattatctaatttcttagttgcattaattccagcaatcaatccctgtgcagcagcttcttcataaccacttgtgccattgatttgaccagctgtaaacaaattcttaattacctttgtttctaatgatggccataattgtaatggatcaattgcatcatattcaattgcataagcatattttaaaataacacaatcttctaatccaggaattgtacgaatcattttttcttggatatcatgtggcattgaagttgaaaatccttgaacatagatagtattcatttcttttgattctggttctaagaagatttgatgttgtggtttatcagaaaatttaacaatcttatcttcgatagatggacaatatcttggtccaattcctttgacaatacctgaatacatactacattttgataaattatctctaataatttgatgagttgtttcatttgtatatgttaaataacaaggagtttgttcttcaatgggtatgaattttgttgtttcatagctaaatgctagaggttcatcggttcccggttgtaattgagtctttgtataatcaacactattgatttcaacacgtggtggtgttcctgtttttaatctttgaatcctaaaacctagttctcttaatttatctgaaagaaataatgattgtctttcttgatctggtccactaggtgtcttttgatctccaactaatatttctgcttttaaataagttccagttgttaaaataactgtctttccttcataaacttcgccattatctaagataacacctttaaccgtatcatcctcaatcattaaatcctcaaccataccttcaacaatatccaaattttcttgttgttttaaaatattttgcatataacgaggataagcttttttatcagcctgtgcacgcaatgattgaacccctggacctttagcggtatttaacatcttcatttgcaaataagtcgcatcagctgtttttcccatttgaccacctaatgcatcaatttctcttacaataattcctttggctggtccaccaatagaagtattacatggtaatgatccaacattttcaaaatgtgaagttaccaataaagtttttttaccaattctcgctggcgcaaggcaagcttcaattccggcatgtccgcctccaacaacaataacatcatacatattttatcacactcctttataccgcattcatattagcacaaattgataatattatcaattttaattcatatatgttataataagttgaggtgagattatgaatcctaaagatattttaaatatgtattatcattttgctgtggttggtgtgagtcaaaataaagaaaaatatggttataagatttttaaaagattattagagaaaaataaacaagtttatggtatatcaccaatttataaagaaattgaagatcatccaatatatccttcattagaagcggttgaacaaccgattgatgtggttgtatttgttgtcaataaaaactatgtttatgattatgttgatgaaatggttggtctaggaattcattatgcttggatgcagccaggaacttatgatgatgaattattagaatatatgaaaaatgttggtgtaacacctattttagcatgtgttttagttgaaacaagtgaataggagattatatgcatattagattagctcaagaatcagattatcaaaagatatatgaacttgtccaaacagcttttttaacagcacaagtcagtgatggaacagaacaagattttgttttaaagttacgtaaaggcgatacatttattcctcagttagaatttgttgctgaagataataatgaactgattggacatattatgatgacaaaacaaaatattcaaacacaaaatggtattttaacaggtgttttggttgcacctttatgtgttaaaaaagaatatcggaatcaaggaatcggtcgtgctttaataactcatgctcatcaatgtgctagacaactaggttatcaagctgcttttcttgtaggggatcctctttattatcatagatttcaatatttccaaacgaacaagttcaacattaaaaataattcagaaatccctgatcaatatgttttagcttgtgaactcaatcatgactctttaaagaatattgttggagaaataaatattgttgaataacagatgatttttcatctgtttttattttgttatggtacactaaagaaaagggaggttttgttatgaaaacatacttaaaattatatttctttcaatatctactgttattcttttgtctatccttacctgctatgacattatatcttattcctcttgttccttttctttccatacttttcttagctatttatcaatatgtacgttattatcatcataaattaaatgaagaaaccttgaagtttcatactactatatcattgattgtgcttatagctttaaccatttcacttattttttctcgtggatatttgagttctccagcttggattcttttctatataacggcaattccttttgctccttatttatttggagttatttttataggagattatatggtatgttttttatctattgttcttattcttttttcaaatattttatttatctctttttatcttaaacctgttcattacattaaaaagatatgtttaattattttaatagctgttattggtatgggaggaaataattttctttatcaaaacagtcaaagtcaaagatataaaggtggacatgattttgaatatatgaacggttattctagcactgatcttagtgattataccccttatgccactaacagtaagcttgtcactttaaaagaacctagttcttttatcattgaaaaggaagctgatatgcctattttagatggagcagaagcttgttatcccgtctatagtgcaattgctaaggcggtatataaggatattgattcccttgaaagacaatatcaaattgattatcaatataccaatggtaagattgtaacatttacaaatacttctgtaggttattctcgtttatttaatggtgaaattgatatgttctttggagctaaaccttcagcatcacaacttgaagaagcggaaagttcaggtgtagaacttgaatatacaccgattggaaaagaagcatttgtgttctttgttaatcaaaaaaatccaattgataatctttcaacacaacaaattaaagatatttatcatggtagtattacaaattggaaagaagttggtggacataatcatgatattagtgcttttcaaagaccggaacgttctggtagccaggcaatgatgaattattttatgggtgatacatcattaaaagaaccgttgacttatgaaatgttatcaggtatgggtggaattattaatgaagttgctcaatactataatgaggatggagcaattgggtatacatttaaatattttttagagggattacatcaagaagatcatgtcaagatactttctgttgatggtgtttatcctacatctgagaatataaaagataagacttatccaatttctacttatttatattgtgtaactttaaaatcaaatcaaaaagagaatgtcaaaaaattaaagaattacttactttcaaatcaaggtcaatatattatcgaaaaaactggttattgtagtctaaaataaaaggagatagtttttactatctccaaaagtttgcgtttccacttccaacagaaacaacttcaaattttgtattgtatgaagttccaccaccaaaatatgatttaccagaaccttcactacctttaaaaatatctactttgtttcctttaatagcaccaccacggtctactacaataccatagatagtcccatctgtattaagattatgattagaaatcttaataacagttccaaaaggaattgatctatcagccgctaaacaataatatttacgacctttataatataaatatggtgagttagaattattaactccagtttttggtgaaagcttaattccggtagatgaagttccaccacatccacgacaatctccaccataagttgttaaacgtccagtaaatgttgttccatcactgactccaccatatctaataactttatcaactggtttttctataatttcttctttaattaatttcttatttgtttctttaccatttgcataagttaataaataagtacgtttaactttaccatttttaccttcttgttgaattgtttttgtccagcttccgctgccttttgtaactgttgagtattctaatgtttcaatttgagtttttgtttttgtttcaactcttgtaatcttaataagatcattttgttggacaacttcttctttatctttatttaaagtatcattcttgtctaactcaatatttaattcatttaaaacatttgatactgtgtcctgctttactaaatagtccttttcttcttgaataccatcttttaatttgatatccacagttggaataaaattcttaatttgattaacggctccagatgttactgttgctaacataacaacaacataaacacaagccactgctaaaataccctttgttcggctgttagccgagacaacgatttccttagctttttttaacataataataatcctccttatttaatcccaaacattcttttggcattaaatgttgtgattctagcaacgtcttctatctccatgttctttagctttgctatttcctgggcaatatacacaacatttgctggctcattcaacttccctcgaaatgggtgaggtgttaaataaggacagtctgtttcgatcattaaatgatcaataccaattgtcgtagcaacctctttaggtactcttgcattcttaaatgtcactggtccagctagcgatatttcaaacccaatgtctacatatctctttgccatttcaactgatccactataacaatgcattatgccacgatgtgctgcatgacttaagatactataagtatcttcataggcgtctcttgcatgaataacaataggtttatcatgtttttttgcaatatctatctgttttaagaagatatctttttgtttatcacgaggaacttcatcccagtaataatcaagcccaatttcgcctaaggcaacaacacgcgggtcttgaagtaagacttcaatttcatttaaatcttcatcggttgtatctttgcaatcattaggactaattcctactgttgcatagataaatgggtattcatgagcaatctctacagctcgttttgaagaagataaatcatatccagcaaccacaatatattcaacttcattttctaatgcatgtgcaataaattgtgctctattaaaatataattcatcgctatttaaatgtgtatgtgtattgaagtacatctctctcaccctagggcataatatcaaatttttttacctttgtcaaatttctaaattaataaaatataaattaagttgttataatcgacatttttcatcattttgttaatataaggcccatacttatttgtcaatttaacaaattattatcatatctttttcacattttctatcaaaataaagaattcatctaagattgtagacaatcattaaaatcacagacattctgtatatagtatgtctatttcacagttttataatcaaaaatgcctactatagaaagaaaaaaggagttgataagctcaactccattctataaattaacctttaaaatcaaattgtgtaaacacatcactgactggtaaattattttcaatactttcaattgtatgtgctaataattcagcaacactgatttctactaatctatcaaacttcttagattcaggaatattaattgtatcagtaacaacaatttctttagctacgcaagctttcaatctatcaattgctggtcctgataaaacaccatgagtacatgcaatataaacatcttttgcacctttttcttttaagacactagctccagcaacaattgtaccagctgtatcaatcatatcatcaactaaaatacaatttttacctgcaacatcaccaataattcccataacttcagcaacgtttggtttaggtcttcttttatcaataattgcaattggacaatccaatgcttcagacatttttctagcacgtgttgctcccccatgatctggtgaaacaatacataaatcatcaatatttttatttttgaaatatttacaaataagaggtaaagcttccatttcatcaacaggaatatcaaagaatccttggatttgacgagcatgtaagtctacagttacaactctatttaccccagctactgttaataaatcagcaactaaacgagatgtaataggttgtctaggttttgcttttctatcttgtcttgcatatccaaaatatggaataacagctgtaatttctttagcagaagctctttttaaagcatcagctaatactaagacttccattaagttttctgtaactggattagatgtagattgaacaataaatacatcttttcctctcactgattcaccaatttctactaaaatttcaccatcagcgaaatgatgaacatcacatttaccaactttcgtacctaaaatatcagcaattgaatttgctaagtcttgattagatgacaaagcaaaaatagttatattgtttttcatgttttacctctttttctccttattttttattctttcttttttcgtattctttcattctaatttcttctaagactttactataaccttgtttattcacttgtcttgctcttgcaattgccattgcatcttcttctacttctttagtaattgtagaaccagctgcaatataagcattctttctaactgttactggtgcaactaagtttgtattacatccaataaagacatgatcttcaatctttgttaaagatttattcttaccatcatagttagatgtaattgttccacatccaaagttaacatcttcaccaacttcagcatcaccaacatatgttaagtgtgaagccttactacctttaccaaaaatagcctttttcatttctacgaagtttcctaagtgggcattttctccaatatgacaatttgttcttagtcttgcataaggtccaatatcagcaccattttcaatgattgaatcacttaacactgaaaatttaatttcaacattgtctttaatttccatattggtaaattcacaatatggtccaatatgacaattgttaccaattactgtttttcctttaataatacatcctggttcgattgttgtatcaacaccaatcactacatctctaccaatataagtattgctaggatcaacaatatttacaccatttaataaatgttctctattaatacgatctcttaagatttgtgttgcctctgctaatgctaaacgatcattaattccaccaacttcattgaaatcatcaatcttataagcatccactcttaatccttgtccatccataattccaatgacatcagtcacataatactcattttgagcattttgatttgtcacctttgataacgcattaaataaagcttgattatcaaaacaatattctcctgtattcatttctgtaatatccctttgacaatctaacaaatctttaaattctacaataccttttacttgtccatcttctttaataacacgaccataatgagttgatgtatcacaatcagcactcataatagttgcttgattttgatgttcttgatgataatcaataaatccttgtaaagtttctttacgaattaatggtgcatcaccatttaatactaaagtcaatccttctttatcgccaagaatatcttttgcttgtaaaactgcatgaccagttcccaattgttctttttgatgaacaaaagtaacaccttcaacaatagcttcaacttgctctgctccatgaccaacaacaactatcgtttcatccacacctaaagcttttaattcatcaacaacatgattaatcattggcttgtataaaacttcatgaacgacctttggtttctcagacttcatgcgagttcccttaccagccgctaatacgacagcatactttttcattttacactctccttaacgcccctattctaacaaaaaatagataaaaaaaaaagaggaaagaagaaatacttaccttattttcaatatttttctttctctttatgcaataattcagtctttctgacaaaattatatttgttttgaaaaaattcatagcctttttctagaatatctgagttcattgtcaagccaaaaacacttgaaccactaccagacatcaatgtcccatcaaaacctaattctatcatttctttttttatttgagcaatttctggaacaatctctaaagaaggtgcttctaaggtatttcctaaactatcaacaactccttgataatcattatcttcaatactttgcttcattttcataatatctggatgaatagcatgagctaaatctaacataccaaatgatttcttagttggtacaccttttttaggtttaacaattaaaacatgacaacgaaattcattatcaataaattctaacttttcaccaattcctcttacaacagccatctgttcatagatacaaaaaggaatatctgccccaacttctttaccaatttctgctaatgtttctaaagataaattcaaaccaaacatttgattcatcgctcttaaaactgccgccccatctgcactacctccagccaagccagcttgagttggaatatgtttataaatatgaatcttgactccagcattaatgtgataacgttcaattaaaatttgggcaacttgatacataatatttttttcatcagtaggcatacgataactatttgatgtaatttcaattccttgatcaattctatgaatataaatcaaatcatgaagtgtaataggtgccataaccatttctaaatcatggtatccatctgctctttttctaacgacatctaatgctaaattgacttttgcataggctcttactttcattcaactcatcctctcgttgggtatatttttcttgcaacaccttttgtatctatgcctccaatcccactttgtttatgtgtcgtatgattgataatatcttcgatatcacaataattcctaacactttcattcgcgactaaactcgccacataaacaggatctaaagcatggatattgatacgtttgggactggacgcaaaattagctccacttgccaacaacaattcataatatgattgacaagctcccgcaataataattaatgcatctttatcttcttgatacgctctagcatttttgattgtttgagcataatcaaatgaatgttgataattattcatatccgtcttatctaaatcttttcttaatgcatcatgccccgtaacaaccaaaatctggggtttatgtttttctaacaattcaacaacacaatcagccatttgactttcgtgcatataataacaatcagctctaatttttaattcatcatatttttgctgacataatttcaaatacttttcatcaccatctaaatgcaatacttttccacgtatgactggttgtctgacaatcgtaaaattttcttcttcatgtggctgaacatcacttaactgcaaatcatcactttcactatcagcaatcagtcttagttcaacccctcttaaataataaattccatccttaatatctataatttcaaaaagaatatctccatgatatttcttcctgacaacataatctccaatattcatattttctcaccatattaatatatgattttataaatattttgtgagattcaaataatcctcaatcgctaattcctctggtcttttattttctagaatatgacattcctctaatatatttttcgtttgttcattaaataatcccttaagattattatagattgtttttcttttttgagtaaaagaagcctttaaaataggagttaataatggttcatatggtttatgaatacgaattgaaataattgcactatcaactcgtggagctggtgaaaatacatttttagataccaacatatctaatgagatatcaccaacactttcaatcattaaagttaatggacttttataatttgtatcagtaagcttttgagccacttctttttggaccattgcatgaatactcgttagttgtgctcctgaagaaataatatgttctaatatatccgaagtaatataataaggaagattcgcaacaatacacacatcttgataatcttgtttatatttttcaacaacctttttcaaatccacagttaaaaaatcttgaaagataatttcaatattttcaaactcacctaacgattcatttaaaacctctttcaaacgtgtatctatttcataacaaacaacatgtccagcatgatagcttagctgttcacttaacgctccaattccaggaccaatttcaatcacacatgttgattgattaatatgtgttgtttctacaattttcttgattgtatttaaatcaatcaagaagttttgaccaaacttctttgaagcttgtaattgatatttatctaataagtacattgtatgagacttctttgctatatctttcatcaaatcacctgtcactattataacataaaactttcaaatacaaaatgaaacctcatcattatcatgaggtctcatattcttttaattgattcttgtaggctctacctagtggtataactgtatgatcttttaagtaaacttctttagagttatatttttgaatcatatttctattgataataaatgatttatggacttgaataaacgctggtgaatcaagttcatttattatatcttttaaattttttctttcatgtaattcaccatttaaagaatgaataattatctgatgtcttaatgattcaatgtaatagatttctgataatcttaattttacaatcatatgtccattttgataagtataataatgaaaatgttcttgaatcttttgtataatttgattttcatattgtaataattcttgtttaaaatgttctattctaaaataaaactgaatattaaaatgaaaacttgtctggattgtatcaaaatcatgtggtccaataaaataaataagagtttcatgagtccgtttaatattttgatatttaagataatcatctttattttgaacttcaataaaatagatatcataatatttatttgttttaaaatctaagatttcagcatgaagctgatgtttttgaataaaactatcaataaatttatatatatcatcatgcgaagaaattatagttattctaatcatgtgattgttcctctaatttctctaaatagtatgataaataactacctgttttaagataatctaagatttttaatgaatcatgtatttgaacgccttgagcttgaagaaaatctacagcttcattaaattcctgacgatttcttgtgattaaagcatcaaattgataaattgaaccatcatacatatgcacaataaacaacaaatcataaccatatccaccaaaaggcatacgtggaacttttgcataagaaacatcaatataatcaatctgatttaaattaatagcaatctgatagatatgttttcgattgaaaacatatgagtaaaatgctgtaactttatctaagaaagtccgatgatacgtatagtataatctttcatgatcaactctccacatcaattgacaataagatattcctggtatcacaattccaatcacaataacaactaatacaatacaaaaaactctcattcctttccataaatccgcagcaaacaagaaatatgcccacataagcacaatgcttgaatacaaaactgctgatttgagtttggctttaccaacatgtttttccataactaattcacctcatttttcttgtcaaaatagattttctttatttctagcaaattcatactttctattgtatcataatattcattctgactcatattttctctttcaataatatcactaatttcaccatcttttaaaaataaaagtttacttgaataacttgcaacaaatgagtcatgagtcaccattaaaattgaaataccttcttggtttaatttcttcaaaagttctaataattcaaatgaattatgactatcaagatttcctgttggttcatcagcaactataatacttggttcagaaactaaagctcttgctatcgcaactctttggacctgtcctccagaacattcgtaaggatacttatttttgatttcttctatatccagctgttttaaaattctatctatcttctcatcaaaatctgtttctttttttatgagtaatggtatgcgtatgttttcatagatcgttaatgtatcaataacattatagttttgaaatataaaacctaaaacatttgttctaaacttgcatagatcagattcactcatatgattaacgttctttccattgatatagacttcacctttcgttggcgtatcaatcgtagataaattattaagtaaagtcgtttttccagaacctgatgttcccataatacaaacaaattcaccttttttgacaactagggatatatcatgaagggctgttgttgcatgccttgtttcaggattatatatttttgtcatatgtttcacttctataattttttcactcataatgattctcctcctttttgtttatttaactggtttcttattttcagataaattatcaaatatataataatttcaacacttacgacatatgatacgatccataatggatagtcatatatcacaatctgcataatcatacagataacttgaaagatgagagggataaataaaacaaatacataaatagtctgaaacatctttgataaggtttctcgtatatctgtttttgaaaaacctaataatcttgcatattgataaactgtattgttattataagtaaacagattgagtttatattgaaaagtactcaacaaaacaataatacatactgtaaaagccaagagtgtaacgaacagatcagactgcattgcattacgagaaagaataagtgctgtaaatgctataataactatctgtaacaataatataatcgaataagcatcacctataaatttctttgcctgacccttcgctaatacttctgtagctgaatctttagaaaacaccttatcaacaaatgcactataccaatatcgatcaattccatataacgagatacaaatagtaagagctattgttatcaattgtgatgcatgacctaaataattaataagtgataaaaacgataataccaatagaataatataaatttttggagttatcataatcaatcgttttttctcactttttttctctttgagattctgtaaaatttctaaaaaagtatgtctatagaaaaagcctgttatatacatgataataatgattatcaatataaccacagttgctatgattgataaaatgactctatcagaaatagcaaatactgaagaatgaatgtttaaaagaggaaacagaaatatatgcacaataattgtcattccatagcctaagatcattgagaatggagtgagaagcatacataaaataatgcagccaatcatatataaagaagccaacctcaaagaactacatcctgaaattttatacacagctaacttatcaaagcttttttcaagatagtccatatatatttgaataagcataataccacttagaaaaacaactataaatgaaataatatcattgaaagatgtaaataagcttactgatgtaaataaaacctttccagcaaataaattgtttttcaataactgattccctgctaattcataaaaaacaaatgataaagcaatcataataaaatacgtaacagcaaaattcatgtagctctttttttctttaactgataacttaatgaaagaatttaataaactcataatgttctcctttctttttccttacacttttattatataagttctatctaaaaagaaaatacaccttccataaacatcatcatattgacttcaacaacatcttctgcattgaaaaatattaaaaatcatatataattaatccaagaggtattgcatatggatagaaaagaaaagattataaagacaattaaaaaaagtgataaacctatttcagcaagtaagcttgctgctcaatttggtgtaagtcgtcagattattgttggagatgtagccttgttaagggctagtggctatgatattattgcaactcctagaggttatatattagatgaccaaaatagtgaatgtgtttatacgattgctgtgaagcatggaaaagatactttagcagatgaattatatacgattgttgatttaggtggttctattattgatgttattgtggaacatcctatatatggtcaattaactgggaagttacatatttcttctagatatgatgttgaacagtttttaaagaaagtgaataacgaacaagcaaaacctttaagccaattgactgatggattacatttacatacaattcaatgtcaaaatgaagatgtttttaaaagaattatgcaagctttagatgataagggatatttatttacaaaataaagacaatgatttctgataaatcagagatgattgtcttttaaaatatgtttatttgtgatttttttctcttgacacaatgggttttctgtatataataggtcataacatgtgtcatgacacatgtaaaatacatataaaagaggagatattatgaatacacataaaagaatacaaacattatcaattgctgctttattaattgcagtaggaactgttattccattatttatgcctaagattattattggaccaatgtcatttactttagcatctcatgttgctgtaatgattgcattatttatttcaccagctgttgcgattgctgtttctttaggaacaactttaggttttatgattgctggattcccattcgttgttgttatgcgtgctttaagtcatgtcatttgggctcttgctggagcaatgtatattaagaagaatcctgatatatttgaaactccacttaaagctgttagatttaatttagctattgctttattgcatgctattggagaaatgattgtcgttgttcctttctattttggagctggaatggatgtacaaacatttagttatatggtatttggattagtaggattaggaactcttgttcatagtgctgttgattttgtcattactttagttgtatggaaagctttaagccaaaatgcaagtattgctaaaattgcaaacgttaaaaaagtttatcttattaaaaatgcttaatcatcttgattaagcattttcatatattgagacggtaatgcttcacttagccatactgtttcatttcctaagtaaaaagcaatgccatcttgataagctttatatgcatctatttgtaaaataactggattttgatcatgacgtgaaccaacaagatatgctgtctctttatcttgagaaagatgtacatattgtctattcattggttttaatccttctttcatgattgaagatagaaaacgtttggctgtaccatgatataaaatttgtggaggaatctgagattccttttttatttttttcttaaatgaatgaccataataagctcttatcctatgattctttaattcatatctttgtttatctgaatgattcattaaatcaataatatcttcctcatctaatattccatatttatcttttaaagcatctaacaattgattcactacaacccatccttcatcatccatatctaagtgatatttttcaggatgatgtcgtaaagcatatgatatttcttttcctaattttacataattcattatttttcacctagtttttttaaaatatcttgtttactaatatgcgccatatttaatcttttaaataaagttttagcatttccatatcctaaatgaaacaaatcataaatctttaatcttctttctttacttccaataatatctaaagaaataaattcttcccaagataatgtttgtatatccttagaaaaagtcacaacattctctaaagcttcgataattgcttcttctcttgcttcagcaattcctaattttttctctcctattgcatcttttttatcaacaaaagcatgtttaatactaggaactctttccataattttatttcttatctgcattcctggataatctggatccgttaaaacaataactcccctagattgattggcttgttcaattaaatcaagtatttcatcatttatagctaatccatgtgtttctattgtatctgcatcaaataacttttttataatagctgtatctgtttttccttcaacaacaataacttcttttattttttccattctcatcaccaaagctattatatagtaaaaatcacttgaaatgaatagatacaatgtaaattcactaaataacctctcctatacaaaaaaatctatgcttttggcatagatcttattttaaacctctaaaaacatctaatacatcttctgataaaccatctgaaacaataatcatatgatcattgacttcaactttacgtccatcttcaccaatcttcttttctttaacaatacgatcataatcatcaccatcatcaaaacgataaacatcaatattaccattatcagttgtataacgatatccttcagctccacctacagatgaagcatctaaagcattcttagaagaataagcaatgtttcttccttttaatccattctcaaaacgtgaataccaatcatcagtttgatcatttgttgcttgtttattcgtattgttttcagtgacattgttatcagatgagctatttgttttgttattctttgcatcatcattaccacatcctgtgaataaagctagacataacatacatgctaatatttttttcattttcattacctccatatatttagcatgcacattacctcaaagaatatacattttaaattcatttatgcttcaatttcaataacaatttctccttgttccttatttcccaagattgtttttacttctttgtagtttgctgtattaacaataaccatcaaaacagttatgtcatatccagatttcattatttcctcaaactcaacatttaacaattcttcgcctctattaattcgatctccttgttttttcttatcagtaaaaaacttaccatttaattccactgtatctattcctatatgaacaagaacttctataccttcatcagttgtaatacctacagcatgttttgttggaaaaaaagttgtaataactccaccaataggtgcaattattttattactttttggaataattccaactccttttcctaatgattcagtattaaataccatatcttttgtttcttttatatcaataacttctcctttaactggtgcaccaatactataaggttgtgtttctaattgttttttattcctattaaataatcccatttcttatcctctcaatcattatcatttatacatatttcaaaaaagtgagtaaaactcactttttaattatcattattacttaacaatcaatgaaactttttcactaattttatcatcagttttatctgatacaatggcaacatcttttaaatcaaatgctttaacattagataagttatgaaattttgaactatcacatacaagataaacctgatcagaatgttctttaactaaacgttttttattagcttcttcaattgtaggagttgtaactcctaatttctcatcaatgccattagcacctaaaaatgatttattaaaatataagtttttcagtaaattttcagtaagagaaccacttaaagatgagttcattggattaaatttaccaccaagaataataacttcagcaagaatttcaccactaacagaaaatatatcagtattagaagtatagatagtaatttttttacctaaaatctttttaaacaatattgaacatgttgaacctgaatctaaatagattgtatctccatctttaataagattagcagctatatcagcaatcttttcttttttttcactatgtaatgtatttctcatcgtaataggtatttcacctatagtagaaatcttttttactgcgccacctgataaagattctatctttctatttttttctaattcttttaaatcccttcttaatgtagaagctgaaacatcttgaaataattcttgtaattcatcaatttttacgagttctttactttcaataatacttaaaatcttttgttgtcgttcatatggaatcattgctttacaccttcatttcttctcaatgataccatatttttttaatgatttcattaataatattaagcaagtttatcctctttattggtaaaaatataacctaaaactgcccctacaataactgaaatagctaaaccaataacaccattaataatattagcattattttcaataaaagctgggaaagttgttacacttccaaaaacaaatgcattagtaacgactttcataagtcctaaatacgctcctcctactgctccagcaataatttgagctaagaataactttttatttttaactaacataccaaataaagttggttctatgattgctgataaagcaactgtaatcacaccagttaatgcaaatccttttaactttttatctctagctttaaagtataccccaattgctgttccaattactgcaaaattacatgcaaacgttaatggacaaatatagtcataaccaaattgagatatattattaatcataattggattgactgcccaatgaactccaaagctcacaagtacactccaacctccaccaattaagattcctgttaatacaccactacgttctattaaccaattaacaacattggcaatagcttctccactataaactccaattggtccaataacaattactgttaatggtaccataacaatcaatgaaactaatggaacaattactaatttaagtgtttctggaacatttttatctaaccatttatataagtatgaaaatgcccaaattgataaaataattggtactactgtagaattataatccattaatactgctggtattccaaaaaatgaagttgtaacaccatttcctgaattacccattaacgcaaggaaatttggatgtaataaggctgcaccaattaatgcagatatatatggacttgctccaaatcttctcgctgaagtaaaagcaagtaatactggcaagaagtaaaatacagccatagaactagcaaataaaatagcatatgttccactatcttcagcaatgaatcctaattgtactgctaaaattaataaccctcttaaaataccagaacctgctaaagctggaagtaaaggcgcaaagattgcagaaatggatgaaaagattttactaataatactttctccatcatttgttccttcttctaattttaattgtccactacctttaactaaattttcaaattcatcataaacatgtggtacttctgttcctattaaaacttgatattgtccagccttattaatcacattaacaaccccatcaacagatttaacagcttcatcatttgcctttgacacatcttttaaattaagtcttaaacgtgttgcacaatgtgtcatattagctatattttcaacaccacctacattttctaatatcccttttgctgtttctttaaaattcatttttattcccctcctttaaaaaaatcaaacattaattgacttgctgcaacagcatcatttttatcaataattgattgaatataattcaatcctagacgatcaattaatttatccatataatgaatcatctcaatatttctttcacattcttcaacagccccttcaatgattgggaatgtatcaaaataaataacgccatcataattatgtttttttaaataataaagcatttccaatgtcttaaatggtgttgatgttcctaccatcaacccatcatcatttaaaccatatccatcatttaaatgaataccatataatttattttgacttccaaaaatatctgctgcaaatgctggattttcatgtttcattaacatatgacaataatctaacgttactccaatattttctctattaacatcatgaagtatcattcctgttactcccataccttcaacaaaagcatatgctctaggttgaaatggtttgtactcaatactgatttttaaatctggagcataatcagctatttcttgataagctttaataatttgatcccatacttttttatagttaatttgaaagctataatcaaaaccgtcataccctagccagattgtaacaaccttaccacctactgcacggcaataatctgctgcatctttacataactgaagtgctttatctgctactgtagaatctgagttccctaattctccattaataaattcatttctaaatcttaaagcaaccccattgagttgtaaatcatatttctcaagtaatgctttcatactatcagcttcatatccaacaatatgttctggataatttaaatcaacataacctaaacctaaattcttaaaatctgataatgttttttctaaatcataaccctcaattcttaaaaatgaattaattcttgttgctaacttcattttatattttcttcctttctgtgcttttattctagcacaacaggaaaacgttttcaatcatattttttcatatttttctattttttttcattatttttcatattttttaatataaaacttctattttcttatcatcattgtacttatttaaaaatttatagtcatatttttccatattatttcattcttcatcatataaaatcaaatttgttataaacaaactaaaaaagcgagtcactataaatcactttatagcaactctctaaataaatatttatttacttttttactgaaaactctgaatttctccacaagcaatcttttctccagagtttcctgaaggttgggtatgaaaatcatctgcattttgatgaacaactattgttctattaataatatcttttggttttaccttatctaaataaatcattccccatgctctacctttagaagcaaataaaggtggtaaatctcctaaatgtgcaggatgtttcttatttgttggattataatgatcttttgttttttcaaaaggaatttttgtatcatttatacacgtatttccttcatgaatatgaaatccataaaatccactatcattttttggtaaatcttttatttcataaatcataaccattcctgacaaataaggataaaaacaaacagtaccagatatcttattaccttgaacataggcaaaagcttctggtttttcattaattacagtcatcaaaatatttgttgtcattgaagtaggttttatttccattgtatcaccattacaatatatgttatgtatcaataaatatgaaaaaataataaagcaaaaataattagctagaactatttttgctttattcttaacctataattatttatgacaatactttcatcagttcttcttcacttcttgcatcaataatcttgattgttaaagcatctatcttatcatctgaactttcttctatcttcataatcagttcctttgatacaaatccaaatttgctttttagttgatttacaatggtttggatcttcccttgtttaatcccttgatccaatccttgtttcaatccaagattgcggcctctttcaagtcctctcatttcactttctaatttaaattcctctagtacctgacacatatctacttcctccctttcttctttctctatccttatgactagttcttcactgtttgtcatgactgctacaatgattgctacttttttatataagttcatatttacttataaatataagaaaatgataaagcaaaaataattagctagaactatttttgctttattcttaacctataattatttatgacaatactttcatcagttcttcttcacttcttgcatcaataatcttgattgttaaagcatctatcttatcatctgaactttcttctatcttcatgatcagttcctttgatacaaatccaaatttgctttttagttgatttacaatggtttggatcttcccttgtttaagtcctctcatttcactttctaatttaaattcctctagtacctgacacatgtctacttcctccctttcttctttctctattcttatgactagttcttcactgtttgtcatgactgctacgactatcgcaacctctttgcttaacaccagttccctgattgtgctcgtatccttgttccatctatagattgtctgaactgcactgaccagtgatttcaccttctcatttctgagcaactctacattgatttccttgatatcatggatattccccttccaggtgttcatcagtcccttcagcggttctggaaccagaatacgatccaggagtgaatggggttgatgccatgtcctgtctccactatatagaactgtactcatgactcccgtaggtctgaaatgctccctatggtccttatcaatcagcttgtactgcaaatgataggtcattgtatcatagagaagcagcctataaggcatgaaatagttaatcgttgactgaatctcaagtccgatgtaaacaggaatcccattgactgttgcatgcatcaatatatcacgccgtctttccatgacattgattctattctcatagataaaataaattgtttcatcactatcgcatagaagcagctcatccgcatggatgacatctttcccttcaaaaagcatggcattgatgatatcggcaaaatgggccttgaccttaaagaatcctcttaaaatcttatcctgtttggactgttgttttggttcttgatatgtaagcgtatttatcatatagattttcctcctttttatagttgagaaactctaaggaaatataacccctatacttatatatacgcttgcaaagtctcatttttcttctttttaaggcaaaaaagttgaaaaagtttattgatatactcttattatagcacaaagcaagcatttatcaattgctttaagcaatttttgcattcaaaaaataacatggaattatctccatgttattcttcatttactttttcaaaggcttgaggaatgatatgtttatcttctttatgtttaaatcgataataacaaatagttaagatagaacatacaacaaagattcctacaaatacccatatttctgttgttaatgatgcatttgccatactaatcacttttctaaatccatctacactataagtatatggaacaaaatagtgaatagatttaaagaatgaagctgatgtttctaatggataagttccagcagatccacctaagttaataatcataaacactaacaataagaattcaccaataaatcctgttgttaagttcaataaaacgataattgacataaaggcagctgatacaataatcgcaaatagataagtcatcaataattgttgtggttcaaatccattaataaacctcaagcaactaatcataacaaccgcagctaaagtagaaacagtatacataactgttgctttagaagcccaatatttaatactagacttagcttctttaataccatatctaattggatacatcaatgtaaaggctaatccacaaacatataatgcaacactcatcatatatggtgccattgcatgcccgttgttttctacaacagatatttctttatgagatgtgtcaactggtgatgccatcatttcaaatgtatcatcatttgttgaaatcttactttgttcagctccatcttttaagcttgtatttaatgttgttacaccatttttaacttcatttaatcctgatcctaatgtagaagaaccatctgctaattgaccagctccactactaatttgtcctgctccaccactaagttgtgcagcgccaccaactaaagttctattgttagatactaactgagaagttcccatatacaattgacttgccccagaatctaatgcttttacaccactaattaatgttggagtttgtttttgaatttcagcagttccattggctaactgactagctccatttgttaaagttgaattattagcagtaattgtttttaaaccttcatttacttgatttgttccaactaaataagctgttactccaccaactaaactatcttttttatcaatagttattttaataggcttattattttgatttaatgttgtaaaacttccaccatttactgaagcatctactttatcaagtccagcttgcatagtttgtaatgcttgtatcaatcccattgtttcaggagttgttccttgttgagttaaagatttttggattgattgaattgattgagataactgattgattgtttgattattcaatgcaattaatttttgaggacctgaaacatcaaatttctcaatatttttattaatttcatttgaagttgataatgctgtcattaattgtgtttttaatgttttgtcaatttctgaattatttttaatactattaattaattctgtatttaattgactagagttagttgcagcctctttaagtttattgagttcgcctaaatctgcactcaacttattattcaatgaaactaacgtttgaagcttttcggcattatcagctaactctttacccatttgagcagataatccttgaacttttgttaatagttgttgattagaacttttcaataaagttgttccttctcctaattcatgaacaccttgagataattgtgtattgttacttactaattgttgactacctaagaaagcttgattaacacctaaagtataagcactaattcctttatttaatgattgagccccttcatttaattgaagaataccactttccaaagcacctgtagaactatttaaagtatctaaaccattctttaatgtataaacaccattatgaacagttaagactccatcagtataatcctttagtcctttattaagtgtatcagcaccatctttaaatgttaaagaacttgaagccaaaacttttaaattatctgaaatcgtatgattaccatcaactaattgattaaccccatcagataatttattcgttccatcacttgcttcacctaaaccatcagataaagtcccaatttgttcaaagattgtttgagcataagtctttgttactgatgaagaaacttcagctttaatcttagcaattgctgaatcatccattttagaagcaatatagtttgttcctggattcgttgtatagttgagaatcattttttgtggttgatcatccaataatgttgttgcatttttagagaaattttctggaattgtaatgaccatataataatcacctttttccaaccctttatttgcatcctcagcattaacaaaatggaagttcatagaatcattatcttcaagattcttcacaagttcctctccaactgctaaagacgaatcattgtaagtcacctctttatcttcgttaacgactgccacaggaatttctcctgtatttccatatgggtcccacattgatccaaggaaaacacatgaataaatacttggaattgcaataatagcaataatgacaacgataatccaagcattgtggaaaatgtttttccattcttgtctaaccataagaaaccttctttctatattttctatagacatttcatatctatggatatataatgtctatagagtattatagttaattcaatataaaagtcaactcttttagatacaaatttaaaaaaatttgttaaaataagatatgaaggtgaaaaggatatgaaaataagacaaagttttgaacaagcaatttgtatactattactcattggagcaagtgattctcctattaaaagtcatgaattatctcaaaaattaggtgtatctgattcttatttaaaaaaagtaacaagacaattagttgtttctggattaattacttctaaagcaagtaaattaggtggttttgttttaaataaaaatttaaaagatatttctttatttaatatctttgaagctattgagggaaaagaaaaatttgttgaaacaactcatttagtagaaaaagtatttgatcctaaactaaaagttaaagaaacagaagatgttattgtcaattatttaaataccgctgaagaacaatataaagcaaagttaaaagaaataactttagcgcatataattgaagctgcacaagaatagccctatggctatttttcttatataataaaatattgtctctaagggtatattatgaataaacaataaataaaattacaattctttttctagataagatatgataaaataaatcacaggagagtgagaaaatgaacgaatatattttaaaaatattacaagatattatggcaattgatagtccttctggatatactaaggaagttattcaatattgtgaggaagaagcacatcgtttaggctttaaaactgacaaaacaaataaaggaaatttacaaatctttgttgatggtgaagatgattatacagttggtttttgtgcccacgttgatactttaggacttatggtaagaagtattaagagtgatggaactctggcatttacaaatgttggtggtccaattattcctaccttagatggcgaatattgtcgtattattacaagagatcaaaaagtttatacaggaacaattttatctaattcaccagctgcacatgtttttaaagattctaaggatgctcctagagaatgtgaaacaatgcatgttcgtattgatgaaatagtaaagtctaaagaagatgtcttaaaactaggaatcaataatggtgattatattacaattgataccaagactcagattacgccatctggatttattaaatcaagattcttagatgataaaatgagtgttgctattttatttggtatgttaaaaacattagctgataaacaaatcaaacctaaacataatttattattaatgatttctacttttgaagaagttggtcatggtagcagttatgttcctgaatgcattagtgaattaattgctgttgatatgggatgtattggtttagatttagcatgtagtgagtatgatgtaagtatttgtgctaaagatggtagtggtccttatgattatgatatcactagtcaattgattcaacttgctaaagatcatcaattacaatatgcagttgatatttatccattctatagtagtgatgtttctgctgctttaagaggtggtcaaaatatcaaaggtgctttaatcggtcctggagttggggcttctcatggtatggaaagaactcatattcaagcagtagaaaatactttaaaacttatcttagcttatattgcttagctctttcttttagaaagagctttattttcgtgcttttattgtatttcttcgttataatgataaagagagtggtgatataaatgaaggtattgttgaaaagatcgattatcgtgggacttattttattattagtatgtagcggagttgcaacaatatatattaattccttatcaactaatctttatgatgaaacaaatgaatacttacaagatattaccatccaaacagcaacagctatcaaaaataaaatcaatgaaaatctaacccaactcaaaagtattagtttgattattcatcaacaagatatgagtcaaaaagaattacttaactatcttgatgaattagctcaaagagatggtctgaaaagatttggtattgcaaacaaagatggtgatgttataacgtctgataataaaacttttaatattaaagagcgtcagtattttaaagattctttagccggaaaagcagcaacctctacatctttgactgattatgttgataataaaaagattattgtttattcagtccctatttataatcaaaaagagattgtagatggtgtattatttggaacttttgagactgataaattatctgatattctttctacagcagcttataatgatgtaggatattcttttatctttaatgaacaaggacaaattattatttgttctgatgatcatttagaattatcaaatattgaagatttaaataaaatttatttaaaagatattgatgtaaaaggtgatggaattatatcatttcaagatttagatgaaacagataagtatttaagttatgctaatattaaaaataacgattggttagtcgcttctgtttttcctcaagaaattgcaactaaaaaaatccagaactttattcaaagtgctctggcaacatggttacttattggggtaggtggagctttgttattgacgtatttctattttactcaaggaaaaaataaactacgaattactcaattagcttatgaagatgctgtaactcaacattataattttaataaattcttagagtattgtcatagtaccaaacggctttctcgttatgtcttaattaattgtgatatcaagggatttaaatggtttaatgagatatatggtgaagatattgcaaatcaattattaagaacaattattcaatgtatggaagaaatttgtcatgaagatgaattttgttgtcgtgaatcagctgatcattttgctttattgctttataaagatacacatgaacatctagaacaaagattatctgatttaactcaatgtattcgtgaaaaatttactggtgagtactcaacttcacagtacttcttccattttggtatatatgaaatgagtgaagctgataatgatattaaaaatgcttttaagaaaacacaatatgttaaaaatgatatgaaacaattatctaaagatgatgttatattctatcaagaagatgttttccaaaaagggctttataaccaacaaattgaaaaagaatttgattcttctcttaaacaagaacattttaaagtctatattcaacctaaagttaatttaaaaactggtgaggtttctagtggagaagcacttgttcgttggcatcatcctcatcaaggacttattgctccagcggcttttattccaatttatgagaaaaatggtatgttagaaaaattagattcttatgttttagaaagaactttaaagaccttagtttattggaaagaaaagtatgataaagagatttctatttctattaatgtttctcgtacttatttatttaatgaaggatttgctgaacatttgattgaattaattgaatcttatccaatcaatccacaacaaatagaaattgaaattactgaaacaactgcttttaaccatcaagaggaattaatccttatcttaaaagaatttaaaaaacatcatttacgtattgctttagatgattttggtagtggttattcttctttaaatatgttaaaagattttccaattgatgttgtaaaaatagatcaagaattctttagaacaaatacttttacgcaaatgagaggacatattattattgaacaagtcattgaactttgtcataaactcaatattgaagttgttgctgaaggagtagaaactaaagaacaaagagatttcttagtgaaacatcattgtgattatgttcaaggatattattattataaacctatgcttattagggattttgagaaacattttattaagtaacagaaggagataaatatgaatatattggatataacaatatctcagggtgagaaaaaacaagtctatatcaaacctgatgttgatgagtatgaaattccaacaaccataatatgtggaaaagaaccaggaaaaactttattaattactgcacaaattcatagttgtgaatatcctgcaacaccagcaacaattcgtttagctcaggatcttgatccacaaaaagtaaaaggacaaattattattatgcattgtgtgaatgttaatgggttttatcaacatgtttctggggttattcctgaagatcattttaatcttaatagtcattatcccggtaaaaaagatggtactgtgggtgaaagaattgcatatttctttgttgagaaggtctttcctcatattgattttattattgatatgcatagtggtgggattcgtgaaacattaactccatgtttattctatccagttgttatggcaaaagaatcattagaagtagctagtgctttgagtattccttatttgattgcctcacatgccacaacaggtgaatatagctatgctgcaacatatttccatattccaggtttacttttagaaagaggatttggtggaagatgtgaagaagaatggattcaagacgactacatagatttaagattagctttaaataagatgggaatgtatgaatatgagcatactgttgatgttcaacaatttaattctgttgacacaatatatttaacgagtcatcaaaaaggtttatggtatcctcaaatcaaagctggacaacatattaaaaaaaatcaattattaggctgtgtaaaggatttttttgatcaagtaattgaaaattattatgctaaggatgatggaattgttttctattatactcattgtttagcggttagagagggttatcctttagttgcatatggaaaaaaatagagattagttattaatctctattttttgatctataaattgaaataccttatcccaataagcttgaggattataatctttagcttcggcatgtcctgcttcttctacaagatataagtctttaggtgcattggttgctttatacacttcataaaccatttcagtaggtacaaaatcatccttacctccatgtataaataaaataggtttatcattcttctttaattgttcaatactagaagcttccttaaaatcataaccggcttttaatctggccactaaattagaaatatctaagattggaaaagttggtaagtgaaaacgtttctcaagttcacttgcaaagatatcccaaacactagtataaccacaatcttcaacatacccaacaacatgttcaagttgatcaccagcacacatcataaccgttgctccacccattgaaacaccatgtaaaataattttagcttgtggatctttttttacaatccaatcaacccaacaagcaatatcatctttatctaaccaacccataccaatgagttctccttcactttttccatgagcacgattatcaggtaaaacaacatgataacctttctcataatatgctgcaccataagacatcatatttgaatgatttgatttatacccatgtattaaaatcgtccacatatgatgattttctttttgcattaagtattttccttttaaagcaatactatcattagctgcaacaatcattggttttgttgttttttcaaaatcttcagctttttttccttcagtttgtttattcaaagcaatctgcttttgtgctccctctaatatatttatctgttcatcttcatcaattactctttgatcagaattactaactggagataaggcataattcacaaaataaactcctacaccatatccagcactcaataacaaacaaaaaataataaaccctatcaaaaatcccttttttttcatttctttcaaccctttcatgtttatacattttatataaaattttttaattaatcaagaaaaaagagtagaaattgtctactctttgattaattgatttttaattaagaaatcttttgcaacatctttaggtttttgttttaattcatctactctataatttaaatcaaccataacatcttcatttaaataattttgcagttgatttatataagtaatgatttctggacattcttcttggatacgatcattgataattggaatagcatgatatggcaagaagaaacttttatcatcctttaagacttttaaatcatatttctttaataatccatctgttgaatatgcatcaataacatcacattcatggctttctaaagctgtataacgtggtgaattatcaattggaataatctttttaaattttataggataggttttttgtaaaccaatgagacaatcttttctttcaacaaatgttaatgttggtgagaatattaattgttttgaaactttacataaatcactgattgtttcaatattatattttttagctgtatcttttctcatagctaaagtataagtattattaaaacctagtggttctaagactgttaattgataacgatcctgcatttctttttttactgtatcatacacttcattaacattactattaggctctaaacctaaaatactaccatatatagtacccgtataatcaacatacatatcaatacttccaccattaatcgcatccaatacaattgaacttgaaccaagtgataaagcttgttccactgcaacatctgtatttccttcaatcaaatactttaacatataattcaaggtttcctgttccgaaaaatccatactaccaatcttaattgttactgactgactctttgttcccatatttgtataaataaaactacctgctaaagcaaaacatgttaaaacaataataagcttatcaataacatcttttattggacttcttttcactgaaagctggaagctttttggtgttaccatgcgctctaagatagagaaaatataatcaattaataaagcaagcaaacatgctggaatagctcctgctagaatctgatccgtattggttgtacgaatccctgcataaacaagatatcctaaaccacctgcaccaatgaatgctgctaaagtcattaacccaacagaacttaccgcactaattctaacaccagccatgataactggagcagcaagcggaatttgtactttataaagaacctgtaaacgagttaatccaattcctttggctgcttctagagtttcttcattaatactatctaatccagcaactgtatttttaataattggtaataaagaataaagtataaccataacaatagctggttttgttccaatccctaataatggaatcataaatcctaataatgccattgaagggatagcttgaataatattagcaactgccataactggttttttagatggtttaaaataagttattaatataccaagtggtactccaattacaattgatattaaaatagctaataccgttaattgaatatgttgagcaaataaacctaatattgatgaaaagttttggataaaataatttataaattcactcattattctccctcactttcatcatattttttagaaagagttgttactaaggtactcttagttattaaaccagataaaataccatcatctacaactggtatagtatacatatccttttccttagcaatgtttaaaacatcaacaattgattcaagtgaggataccgtcacacagttttgattcatgacatcactaacacgtttactcttattttcttctaaagctgcctgtgcagcattaataactcccataaaatgccgatctttatcaataaccatcaaactatcaacccggaagttaaacataatatttaaagctttaatacattttaaagaatgtcgacaaacaattggttcttcaatcataatatcatgtgctttaattaattcaggtgaatcccaaatacgtttctttccaacaaagtttaaaacaaaatcattagcaggatgttttaagatttgttcaggagtatcatattgttgaatctttccatcactcataatacaaatacgatcagccaatttaatagcctcagccatatcgtgggttacaaagacaatcgttttttggacatttgcctgtaatgttaataattcatcttgaagttggcttcttgtaattggatcaagtgcactaaaaggctcgtccattaagataatatctggttcactagcaaatgctctagcaacacctacacgctgttgttgaccaccactcatctgttctggatatttatccatatattcatctggatctaaacctaccatatttaagacatttttaactttatctatcaaatgtttatcttttttatttttgagttttggaatcaattcaatattttctcttacagtcatatgaggaaataaacctgtctgttgaattacataaccaatactacgtcttaaatctatttcattttcttgacttatatcttttccatttacaagaattgttcctttggttggtctaatcagcttattaaccatctttaaagctgttgtctttccacaaccactaggaccaataatacatacaaattctccatcatttatcgtaaaagaaatatcttctaatacatgtttttctttgaaggatttataaatatttttaaattcaatcacatcaatcacttccttttctttcattctatgcctaaattgtgactgtttcgtgaattttcaaacataaaatttatctttattgtacacctaatttatgaatttgttatagtttgtcttagaatttttgtatttattaaaaaaactggacataaatccagtttttgtttattatttctcttgaattttttcatctttgagtaattgtttttctgcaactttaaaaaatgggatataaataacgactgccatcacaatttcaattgcagaccagacagctgcacgccaatcccagccggttgccattaatgggccgatgattggcggcattgtccatggtactaacgtaacgggagcattcactaatcctaccagcataacaagataacttgttgcagcaagaatcaaaggaacaagtataaatgggatcatcattaatggattcatgatgatagggaagccaaatataactggttcatttatttcaaacaagccacttggtaaagaaatttttcctaattgtcgataagttttactctgtgatcttagcatcaaaaagactaacgctaaagttgctcccgttccaccaacattaacaaataaactactaaagcctgctgatgtaatgtaaggcaaaggtaaatgttttgcataagccaaaccatttgcagttacaaactgcatgaagattggatcagcaacaccttcaagtgccatatctccatgaatccctgcacaccataatagactaactaaaaaagtataaacaacaattcctggtaaagtatttaatgcaaataataaaggagagaatatttgttgaataaacccattaatattaaaatgcaatggtactctcaccaaccaaaagagaaatagtgtcaaaacggcaggaaccaatgagataaaagaattactaactgctggtggtacaccttcaggcaaatgaacaacccaatttttacgaatacataaatgataaatctcgactgcaacaattcctgaaataattgcagtaaataatcctgtcgaatcaaatccggcagcatcaattgtaaaatcatctgataattgtgtaataataaaagcaacaagtgctaatgctcccccagaaataccattcaaatcataactaacagctaactcataaccaatacctacagctgctaataaagcaataattccaaaagatgcattaactgcagcattgatcattccctcatatggcttcaaaaaattcatccatgcatcaattggaatatttccaacaatcaaaaacatacttcctgcaatgatagctggtaaagttacaaccaaaccattcctaaccgccactaaatgacgctgattagcaaccttagctagtggaggaattaatttgttttgaatccaatcaaataaattatccataacaaactcctttcttttttattttaaagaccttttctatattcattatagaattgccttttcttaatgtaaataaattagaaagaagtcgaaagttgttactaagagtgttattttttacaaaataaaacactctgttacatgtctttatgtttttgataataaacttcacgtgctaagtactctaataaataaaccactggtaattgtgatgtaatattggtttcttgatatgtttctacattgatataataaggaatatttaaatcagagattctcgctatggtagaattagcactattggtcattgatataactttaatgtggtgtaaacgaaaacgattgatataatctacaacatcttcattttgtccacttacagaaaatacaattaaacaaatatgttcatcaaattgttcagaaacataataaactggactattttgtggatcagttacagctaatgaaaacttatataatgaagaaaacaaattagctccataagttgccataattcctgaagtacctattccaacaaagaataacagttctgattgtaaaataaaatcaatagcttgcccaagttttctttgaaaatctggttgcgttgttctttgtaaaaattctgtgaagattgtttgatcaagagattgaatgagggtattattttctttaatactttttgcataatggtacagttgagatttaaaatcagcatatccctgacacccaaattttttacaaaaccgtaaaatagttgttgtacttacatatgttgcatcagctagctctctaatacgcatatagataaccttatccaaattcgcattaatataattataaatagccatttctgtaggctttaattctacttcttccaataaaaataacatatcctcacttcctcacgtttttcatcataacacttccctttcctaacaacaaccattacacttgattgcaaaaagcaaaaaacagatacaatgcgtatctgtttattcttgcatattcttaaatgctgttgaaagcattaatttaatacgattcaattgattgacttcactagctcctggatcataatcaacagccacaatattactttgtggatacttcttacgtaaagctttaataacccctttacccgtaacatgatttggtaaacaagcaaatggctgcatacaaacaatatttggtgctccttcttcaattaattcaatcatttcaccagttaagaaccaaccttcacccgtcatatttcccattgatacaatttcagttgcctttttagcaatttgatcaattggtgtaggagcatcaaaacgcttagaagctttcaaagctttaatcatatcttttcttagataatcaacaaaccaaattgcaaagttacataaccaaactgaagatttcttgacatcaaaatgttcatgttcataccaagtattatagaaacaatattggaagaaatcaattaaatcaggcatcacagcttcgccaccttctgattcaatgatatcaacaatttgattattagctgttggatggaatttaacaagaatttctccaaccaaaccaactctaggttttttaatatctaataatggtaactcatcaaagtctttaacaatttgataaacattttgtttaaattctttcatactaccattttccacattctttttacatttttctacccatgattcatataattcattagccgaacctggtgttgcttcataaggtcttactcgataaagaacacgcatgaataagtctccatacatagctccaatgataacctttttagcaactttataggtaattttgaatccagggttactttctaaaccagaaagattagctgagataactgggatatgttccattcctgcatcttttaaagcttttctaatgaaagcaatgtagtttgttgcacgacatcctccacctgtctgagatatcattaaagcaactttatttaagtcatactgaccactatttaatgcattcatcatttgaccagtgactaagatacttggataacaagcatcattattcacatattttaatccttgttccacagcatctttatcaactgaaggtaaaacaacaaagttatatccttctgagttcatagctgtttcaacaaattggaaatgtaacggtgacatctgtggacataggattgtatatcgatcatctttcatttcttttgtgaaagggactttcacttgttcatattttttagataaatctataatatcttcttttttatcaactgttgcctttaaagaacgtatacgtatacgaatagctcctaagttacttccttcatcaatcttaattaaagtataaatcttatttcttgcttttaagatttcagcaacttgatctgctgtcacagcatctaatccacatccaaatgaagttaattgaattaattgcaaatcagattgagaagatacaaaagaagctgctttatacaaacgagaatgatatgtccattgatcaacaactcttaacttcaaatgttcttcatccaaataacaaacactatcttcacttaataccacaaaaccttcacttgtaattaaatcaggaatcccatgattaatctctggatcaatatgataaggacgaccagccaaaacaatcccttggatatgatgcttacgcatataatccatagcacgttttccttcttggcgaatatcttgctgacaatgctttaattcttcataagctctatcaatcgcattatgtaattcattatcacttaaattaaattcttttaattcttcttttaagacattaaataatgttttagggttatttaatgatacaaatggatttttaaagttaatatgattttgttgtaaactatccacattatttttaataacttctggatatgatgcaacaacaggacaattataatgatttccagcatcttcattttccaatctttcataagcaactgaaggatagaaaataaatgaaatacccttttgaattaaactttcaatatgtccatgagtaatctttgctggataacatgcactttcacttggaatagattctatacccttttcataaatcgctttagatgatcttggtgaaagaacaactctaaactttaattcagtaaagaaagtatgccagaatggatagttttcataaatatttaaagctcttggtatacccactacacctcttgaagcatcttcaataggtaaagaatgatattggaatacacgacgatatttataatcaaataagttaggtaatgtctttgattttaaaggtaaattagctccacgttcacatctatttccactaataaactctctaccatcattaaatgaagtaattgtcaacatacaattattcgtacacttaccacaattacgcattgtattttcataagttaaattctctaactctgctaatgataaaattgtagaacccttatgatcgtctctttccatggctatcttagccattccataagctcccattaaccctgcaatatcaggacgaataacttcaatatcagcttctttttcaaaagctcttaaaacagcttcattataaaaagttccaccttgtacaacaacattcttaccaatttgatctttatttcttaatttaataactttatataaagcattcttaataactgaataagataaacctgcggaaatatcagctaaagtagctccttctttttgtgcttgtttaaccttagaattcataaaaacagtacaacggcttcctaaatccaatggatgttttgaagttaaggcaagttcagcaaattcatcaatctcataccctaatgaatgagcaaatgtttctagaaatgaaccacaccctgatgaacatgcttcatttaacgtaatatcttgaataacatcatcttttattgtgatggctttcatatcttgaccaccaatatctaagataaaatcaacatttggttggaaatgtttagctgctgtataatgagcaattgtttcaacttctccaatatcaacttttaaagctgctttaatcaatgcttcaccatatccagttaccccagcttttttaatttcacaaccctctggaattaaagcatatacttctttcattattcttataattaaatctaaaggatttccttcatttgaattatagaatgaataaagaattgaaccttcattatcaattaagataacctttgatgttgttgaaccaacatcaattcctaaataaatatcacctttatattttcttatatttcttttctttgtcattgcttgtaaatgacgttctctaaatcctcttaattcatcttcattatggaaaagtggttctaatgtatgactagattcatttccttgactctttaattcttttaattgttgaattaaatcttttaatgcaatagcttgttctacttctttagcatttaaacaagctcccatagcaacaaacaattgagaattatctgggaaaataatttcatcttcttttaaatttaatgtttcaataaaacgtaaacgtaattgatctaagaaataaagtggtccccctaagaaagcaacttttcctttgattggttttccacatgctaaaccactaattgtctgattaacaacagcctgaaaaatagaggcagcaatatcttccttttgagctccttcattaattaatggttggacatcagttttagcaaaaacaccacaacgagatgcgattggatagatacgtttatgatttttagctagatcatttaaaccagatgcatcagtttgaaggagagttgccatttgatcaataaacgctcctgttcctccagcacatgtcccattcattctttgttctaatgaaccttcaaaataggtaatcttcgcatcttctccacctaattcaatagcaacatcagtacttggaatatatgtttcaattgtcttagtacaagcaataacttcttgtacgaatttaatatgtaaagattcagaaatagataaaccaccagaaccagtaattactggatgaatatccatatcaggatattgttcattgatttcttctaataaagttaaaattgtatttctaacatctgaattatgtctcacataatttgaatataaacatatatccttctcatctgttaaataagctttaactgttgttgatccaacatcgattcctaaataaaattgactcatactctttctccttcgcttattatccaaccaaccaccattttataaatactaaacaaatcttctctttatttcaaacattatgcccataaattttatccaatcaaaccagatatacgtttacagattctcacatattctaaggcatccttttcgcctaactggcttagcatatgactaatatgatgaatcatttcatctctacgagtcatcgcaaattcttttcctttatcggtaatatagacttgtatttttcttttatcattaagatcacttattctttgaatatattctttacgtgataagctatttaaaatagctgccacccttgatgtattgacatctaacgcatgactaatttcaccagcattagcaccatctttttcatcaattaaatacagcaggactgccagttctccgcgtttgatttcagcaatattatattgaacaattcttcctgctttttctgtttttgtaatgtattgaataagttcttctgcataattttcgtagttcatattttacctcacactatgagcattttatactcctttatattttttgtcaatccttttgtttttttatagaaatttagacaatttgattagtttttgttgaatcataaatatatacgagtaagctacattgacactatttcaaaaaagagtcatcatatatttgatgtcattttttaatcttggtacaatagaataaaggaagtgaattgatatgtatgaaaaaattaaagagctttctactctctattatccagatacagtaaaaatgcgtagagacttacacaaatatgctgaaagaggttggttagaattaagaactgcttgtataatagcaagtgaattagaaagattgggatatcaggttttagcaggtgaggatattatgaataaagaagctagaatgggagttccacctgaaaccattttacatttaaattatcgtcgtgctcaaaaagaaggagctaatccaaaatatcttgaaaaagtaaaaatgggaatgagtggcgttgcgggggttttgaaaaatggagatggtccaacaattgcattaagatttgatattgatgctttgggattgattgaagaaaattcattatctcattttccttataaaaatgggttttcatctgttcatttaggggcaatgcacgcttgtggtcatgatggacatactgcgattggacttacaacagcaagaatcctgatggatattaaagaaaatattcatggtactattaaactgatctttcagcctgctgaagaaggtgtaagaggggcaaaatgtattgcagagagtggttttttagatgatgttgattatatattagcagctcatattatgccacagaatagtcaaaagtatgatttgtattttgggatgaatgattcctttgcaacaactaagttagatgttatttatcatggggtatcaacacatgcggctgaatctccacagtttgggaaaaatgctttgctttcagcggctaattgtattatcaatctccattccattcctcgtaacagtgatggttgtacccgcgtcaatgtgggaactgttcatgctgggacaggacgaaatgttgttcctgaaacagccaaattagagattgaagtgcgtggtgttacgagtgaattaaatcgatatatggaaatctatgctcgcgatattattcaagcctcagcacttatgcatgatactgttgttgaggttgaggaaaaaggaaaagcttatgcattaaattgtgatgaggaatttatgaatcagattagacagctttgtgaagaacatttatctgatttaaagctacctaaaaagaatcttagtccacttggaggaagtgatgatttttcttatatgatggaaagagttcaagctcatggaggtaaggccacttatatgaaattgttgacacctatggtatcttcaccacataatgattcttttgattttaatgaaaaagttctagaaaaaggtcctagaatctttgctagtattgtttatggtttacaaaaagaaaaagataatttgtgattatctttttttattttgacgataatttcgtctattgggtttatgtttaggttttgattttgtttctttttttactggttcacttaaatctttcattggataataaggattatcaacaactgggatttcttgcttaataaatttttcaatcgcttttaaatcagctttttcatcataacaacaaaatgtaatcgcacttccttgcgccccagctctcgccgttcttccaatcctatgcacatagctctcactttcatgtggaacatcaaaattaatgacatgagttaattcatcaatatcaatccctcttgctgcaatatccgttgccactaagatacgtgctttatcatttttaaaattatttaaggcacgaactctagcattttgagatttcccaccatgaattgtttcagctgtaatcttagcacgatttaatttcttacataaagtatctgcattcctttgagttcttacaaaaacaatcgcattataaatttcattgccttctaataattttaataacagttttgctttattcactttatctacataatataaagattgattaatcttttctacagtcacatttcctgaactaaccataactttttttggattaactaaaatttcatcaaccaaatgtttaatctcatttggtaaagttgcactaaacatcattgtttgtttttgtctaggaagcaacttaataatctgtctaatatctctaataaatcccatatctaacatacgatctgcttcatctaaaacaaaatattcaatatgactcaaatctaacaacccttgtttatgtaaatctttcaaacgacctggtgttgcaactaaaatatcaatccctcgattaatctttgtcacttgctgagattgtcctacaccaccaaaaataactgttgactttaaattaacaaaaggtctaaatgcttgaaatgtttcatctatttgaatagctagttctcttgttggtgctaaaataagagctttgattgtacgaggatatttatccgcttcatctcttaaatataatttttgtaaaataggtaatgcaaaagcagctgtttttcccgttcccgtctttgcgcatccaaataaatcatgtccttctaataaaactggaatcgcttgttgttgtattggggatgcttctttataattcatttgattgacagcttcaatcaaaggttctattaattctaattcattaaatttcattaaggtcctcttttcttttctattcgcctcagtataacacatatttcagtagaaacctaataaaataattgggatcattctaacaacaatcccaattatataaaactctactaaaatccaattttctcaaatcttctaaagtcataaaaaaattcgcaacaccacaatctccccacataatctcttgatcatcaatattatctgaatctatttgtaatagtaacacttgataatcttccatttctccctcacgtggatcaaactgtgtaaagaaaggatatcctcctattctatgaccactattattgagttggtcataaataatatctatatcttgatcttctaaatcttgaaaagtttcaattaaatcatctggataacattcattccatagttttgtaaatacactatcaaattgataatctgaaggtgataatgcttgttttgttaattgaaaatccaatccaaattcatcagatataggaaaataaaaatcctcatttggtgtgatttgatacttacttaaaatatcaacttgcgtaattgtttcatcaatatgagaataatagataacttcgtaatcatctggtaatccaatgatatcattatctaatgcccaaaattgtaacattccttctcttggtaagcctagttgatttttaggtaaatcatccatacgtatttgtgccaacaaacgatattgttcgtctttatcatttgtaggaacattttgattttttggtatataaggtataccaccaaacttactatctgtaattcttaattgatttgtatttatattaatagaaattgtttctctttctgttttctcttgaaatacattaagaaactcttttatcttttcttgactcatatattatcccctatctctactatatttaaagattttcatcaggtatttcaacttctgctttaggaacacaaagatatgtaaaactattaatttgttgaatctgtccaccaataatataaagaccaccacataaaaaatcaattactctttgagcttctgttctttcaacattttcaatatctaatataactcgatatccttcttgaatttgatctaaaacatcaacagcttcactatagcttctgactttatagataatctctttcatcttattcatcctcctgaaacaatgctctaccaattctaacaattgtcgctccttcttctaaagcaactttataatcttgtgacattcccattgataattcttttaatggatattgtggataagcattctttaatctatctaataattgttttgtcttttgaaaataaatacgcgtatcttctacttcaatatttggtgccatcatcattaatccatcaacaattaaatgcgaacaattcttcaaatacgtcataacattatccatatcatcttcatcaaatccatgcttactttcttccctagcaatattcacttgtaataaaatatgtacctcaatattccttttacttgcttgtttctctaattcatcaatcaaaccataatcattaacagaatgaatcaaatcaactttatcaataatatatttaaccttattcttttgtaaagtcccaataaaatgccaatgcccctgaccatgatacttttcatatttatccataaatgcttgaactctattttcaccaaaataaaaacaaccacatttttctaattcttctatttccttttcatcaacatatttagttgctgctactaatttagcaggtgatacatcttttaatatttcttttactgcttgttgatttactttcatgtcttttcacctctaaagatattatatatcttttttataattttactatacttaatctcaaaatgttcacatagatatgttacaatagaaaccatagaaaggatgattcagatatgaatgatttacttgaaagatatttaggtgcagtttgttcgtattttctaggctttaagaaaaaaagagtctatgatgatttaaaatatcatatacaatcatcagtacatcaatatgatgacttagaagatttacttgttaactatggtcatcctagaagtattgcattaagctatggctatagacctattatccagcatatcttcaatcctaaagtagtcagtattattgaaagaattgtcttattaatttctggtatttatctattcttttctacacttttttatcttgaacaatttaactgcttaccttttcaagattcacatcaagtcattgctactttaaatacctctaatattattgctttattactatcacatccatttctagttatgacaagtattgcggtgattgctattatatcactcatattagtagatcaaaaatataaagtctctcaagaaatagatcctctatggtctttacaaaaactctatgacttaccacatcaatcacattatcctagtcatgttgctgaaacaatctttatgattatcttcacaatattctttatcttttattctattttcttttcaagagatatcattatacaaattcaacatgaatcctatcaaatgatacatttaatgacttatttctttcaaccattcattatgataatctttgtagattatatcattgatataactaaaaaaatatatactaaaaaatatctaaaatacagtacactcattaacttatttactttaatttcactaacaatctttgttgttaattcaggattcctacatgattacctattaccattaaatatcaatatcaattacacatttgttaatttctttatcataggagccttaatcatgatttatacaatttcattatataaactcttaagaaaccttaaatcatatcgttccttatttagaagctaaagggtattgcatcacgcagtaccctttactaatttctctttttcttcccatctttgttgaatcaacctattaatcaaatatataacaagtaactcaccatataatataaacccaaacgtactctttaaaaacaaaaacactttccctaaaaacggaatatgataaacataagtccctaaaatatcacttctcttagtttcataattatcataaaaatctttcccctcagcctgtgtcctataataaagattcccatcatttcctatttgtgtttctctaaaataatgtgtcaacaaaatatcatccccaaaacgattcgcttgaaatgttacaatcgtattaggtgctatttctacatcttcaggtatcaactttgttaaaactaaagaaaatgtaggaattgttggttccatgctatctgtcataactgtgtataaacgatatccagttatcttagcaaccttatcaggaaagtaaacaattgtcacaagacaaaagataaactctatcataaatattgtagatataaatctcttaatacttctcattgtttactctcctttctttgttgacaaaaaaaccgtcctaagacggttatttctattttactgtaatttaccagcaacagttagttctgcattattcatatcttcataacttgcagctgttggagtaataacaactttataattttttgtttctgaaccagttactgtatctgtattatcagaaattgcattgccctccatatcttgaattgcaatattcactttgctatctaaattagtaccggcactatcatttaatgtaggagtcaattctaattttgttgctttggaatccgtattttcaatttcaaaagatacctcaacagttgtagcaggtgcctctgttcctaattcatactgaccttctgtaggctgagtaatggtttcagtaagttttactggttttcgataagttaatgttgcattttgtgttgcatctaattgatcccaagctgcaaatgtgaaagctgatgttcctacaacggcgattgctgttgctaatgaaagtattgtactctttttcataatatttttcctcctctaaattttattattatgtgggtatttaccgtcttgtttttacacctacattgtatgacaaaatagagggtttgtataatacttatatatagatacctagttatgtgattttatacatagctacatgtgtgaatagttatcataaatgatatctaaaaagattttagctgcatttgataatactgttctttttctttttataataacaaagctttttgttatatgacaatttttgaattgtaggcttttgatatgagaatgttttaattcttcgatttgccatttgtttcctaacataattgcattagcatgattaatcatattgataattgcatggtaattactcatggtaatggttgttttgaattgttttaatgggatatcatctatggttaaggaaaagttgagttctgaaaagaaatcatatggtaagtggatgagaggaaagtctaataagtctttgacatctatttcttctttttgggataatggattgttttcattgatatgtacataaagtggtcctgttcctaggatttctatttctatgtctttgatttctgccatttttttaaagatagttaattggatatcattaagaatggttatacctatttcagatttcatatcaataacattttgtaagacttcttcagcagttgtttctaaaaattttatttctgtttctgcactatttattcgtttatagaagcttaagataagatcatctcttaaaaagatagaatctacggatattgataattgactatagatttgatcttcatctagttcttttattctttctaagactttgaattgttctaagattgattttgaataataatataatagttttcctgtgggtgttaaggttacgcctcgattatttctttctagtatttgttttcccatttcttcttctaaagcatgtatagaacggcttagattgggctgtgatatgtatagtttttctgctgctttattgatactcccacaatcaataacttcaacaaattgaaacaattgctccttcctcatatatttcatcctttccttataataatattctatcatatcgattatatctgacaaaacaaaatcgaatattacaaaaaaacaatgccttatgacattgttttaaatatttccttcttctaatgctctaaaaaagtctttagcttcattatggatattaactttttttgtttcttctacaacataccatgttaattcataatcttgaatgataataggaattctttttccacatctatataagaaataatcttcttctatcaattgttttgcaacttcacttacaacttgcaataattcataatatccaactggtccttttccaatataacgcattttctcatcataacaatcaggatcctcataaccaatactttctattccctcttgtctataccattcaaataaaacttccaacccttcatcatctaatatttctgtttcttccatttctaaaaaagcaaaattccatctttcttcactatataaaccagtatcatctccactataattttctctaaaaaaagtttcattattcatagaaatattaaatactgatacattagaatattccttatattcatatgcttcatttgaataaataaaaaatgtaatagaataagcatcacttaaatcccactcatccattgttttcttaactttctgatacaaatactcttttaaattaatcattatattgtctccttttttatattttactatatattttataaaattggaaagaaaaaagctgcctgagcagcttatctaatctttgtaccatttggtaaactttgtactgttgcaagttcaagaacttttttcttagatcctgctaaaatcataccttgagattctactcctcttaatttagcaggttttaaattagcaacaacgataacctttttaccaatcatttcttctggtgtatagaaatcagcaattcctgatacaatttgtcttgtttcttttccaatattaatttgagaaactaataatttatctgcatctggatgtttttcacatttttctactgttcctacaactaattcaacttttgcaaagtcatcaattgtaatttgattttcttcttcttttggttcttcttttttaggttgtaatgcttcaactttcttttctacttcttttggatctagtctagcaaataattgttgaggtttatctgtaacttttgttcctactttatataaaccaaatgttgttaagtctttaaattctctttggtctgtattgatttgatctaaaatctttgtagatgttgaaggcatatatggttctaatgcaatagcagcaaaacggatagcttcaattaagttataaagaacagttgctaaacgatcttttttatcttcttctttagctaaagcccaaggcattgtatcatcaatatatttatttgttcttcttaataaaacaaagatttcatctaatgcttttgatgccttatattcatccattaaatcttgtaccttttgaggcattgctaaagcaatttcttttaattcatcatcaacaggttcattaacaccaggatttgtaacaataccatcaaagtatttattagtcatcgcaattgttctattaactaagttacctaagatatttgctaaatcagagttaatacgttctaccaataaatcccaagtaatacttccatcattatcataaggaatttcatgtaaaacataatatcttacagcatcaactccaaagatattcactaaatcatcagcataaataacatttcccttagatttagacattttactttcaccttgtaataaccaaggatgtccaaagacttgttttggtaatggaatatctaatgccattaacataattggccaatagattgtatggaatctcacaatatctttaccaattaaatgtaaatcagcaggccaatatttcttatataattcaccatgatttccatctacatcatatccaagtccagtaatatagtttgttaatgcatcaatccatacataaacaacatgttttggatcaaagtctacaggaattgaccaagtaaatgaagtacgtgaaacacataaatcttgtaaacctggttttaagaagttattcatcatttcattttttctagatactggttgaataaattctggatgatcttcaatatgtttaattaaacgatcagcatatttagataatttaaagaagtatgcttcttctttagcatcatgaacttctccaccacagtcaggacattttccatcaactaattgtgattctgtaaagaatgattcacaagctgtacagtattttccttcataatgacctaaatagatatctccttgatcatataatttcttaaagattttttgaacttgtttcacatgatattcatctgttgttctcatgaaacgatcatatgttgtattcattaaatcccaaatatttttaacgactgctgctttttcatcaacaaattgtttaggtgggattccagcttcatttgcttttatttcaatcttttgtccatgttcatcagttcctgtttgaaaataaacattatacccttcttgtcttttacttcttgcgattgcatcagctaaaataatttcatatgtattaccaatatgaggttttcctgaagtataagtaatcgctgttgttaaataataatcttttggatctttcattttatctttctcctttcaataaaaaaacgcccttatataaaaggacgtaaatatacgcggtaccaccttttttacaccaaagtgtctctcaaaactttaacgcagttaacgtttatccctaactattcgagataacagctcccagaccatcttcataaaagttatgtactgatttacaccatccatcagctctctataacgcccttttaatcttttctgttcttcgcttttttctaccatttaaccttaacaaatatcacttttaaagtcaatattatctcttacatttttaaaattatcattaatttctcttgattttctataatccgtctcacacttattttcctattccttttattcatcagtgttttagcgtttttcatgagacttttataagaaaatcatgcgtcatatttgtcatcaacttgagactcacaccatgactttccatgatacaataaccctatcatcagactcgacagttaatgggaaggaggtgttaacccatgttggagatttttatctcttttggagttgctgtcgtggcagatgttgttgctgatatcatctgtaaatggttatagcagaaatgatgattagccaaattgaaaaccaggctggcgcgcctggttttctttttttcccatgttagagttttcttctcgaaaagataataacataatcttttcgatatttcaagtataatcactaacctaaaaattatactaactcattaaataattgatacattctttcttgaatttcactaacatcatttaatgcatcttcaatttttcttgcaacaatatgattatctttcttacatacacaataaccactttgatgattcaataagagttctactgcatattgtcccatttgtgaagcaagaatacgatcttgaggaactggacttcctcctctttgaatatgtcctaaaacaattgaacgcccagaaaaatgggtttccttagaaattctttctgctaatttttcaacatctatcattttttcactagcaataattatagcatgtttcttgccttgttgtttttcataataatccatcatctgaataatataatcttcatcatatcctgtattcttagtaataataaattcactcccacaagcaatcccagaatataaagccaatgaatctttatgatttcccatcacttcaatcacaaaacaacgatgatgtgagcttgatgtatctcttaatttattcactgcatcaacaatattataaagtgctgtatgaaaaccaattgtttcatcagttccattaatatcattatcaattgttcctggtatacctacacaacatattcctttttctgataattctaatgctcctcgataagttccatccccacctatcacaatcaatccttcaattcctctttcttttaattgattgatagcctgcacctgtacttgatcttctttaaattctggtaaacgagatgaacccaaaatagttcctccacgacttaaaatctctgaaacatctacattctttaatttttctatctttccattaaccaaacctgtatatccatcataaactccataaacttctactcctttacgacttgctactcgcataattgcacgaatcgctgcattcattcctggagcatctccacctgatgttaaaacagcaatctttttcatttttgtacctcctttattgacaagatcttgtatatacatttctcccttcaatactaaaataacatgcatttttatgttcatttttaagtgcttcataactaaattgatgggtatttaattttgtcgctacatcttctactcttacatagacgactttgttatctttcattaaacattttaatctagttggatcagctgcttgtggttctaatataatatcactcatctcattttgcataagagttggtactttataaaaccctctagcaaattcttctaacattgtttttgattgaaagttttgaatatagggaaggacttttaattcatctctttgttttgactgacgaacttctactattcttcctatatcattaatcgcgtaaattttattattcaaattggcatatgctataggagtggcttcttctacaccaatcacaacatttccaattaaatctatatctattgaagctttttttattgtaggtaactgcttaatttcttttattactttttccttattaataaaaaaataataagatgatggtttaattgatatgtgttttaatatttcttgttgggaagtttgatggactccttcaatcttaatagatttcactcttggataatcacttatcaaaaacatagtaatcataatgaaaataaataaagatataataactttgacttttcttttaagttttttcttttttctttgtttatatgtcttttgaacagggttctcattatattcattataactcatgaaaatcacttcctttgaaagatattttaacatgaatttaatactttgactatttcattcatatcttttgaatataagataaagtcatgtcataatgattatagggttgatatttattgaaaatcagtgtatattgttgaaaatacttaaaattttgaaagtaagtaggtgaaagtatgaaaaagatgttaatttcgattattatgcagtttctatatcgtggaatgaaagttctttatcatgaagataagcgtatgaaagaggaatttgatggatggaacaaggataaagtcattcaattaagagttaatcatggtccttcaattacaattgcttatgcttatttgaaaggattgtctaaggttcatcgtcatcctgatattgtgattacgtttaagagtattgatacagctttaatggtatttactggacaaatgagtgtaaagcaagcttatttagaacatcgtttttctttaaagggagatgtatttgagagtatgcgttttgtaagatgtgttgatttaactgagacttatttatttcctcgttttatgacgaaacgtatttttaatcattatgagaagaaatataaaccaagtctttggatttatttgaaagctattttaactttataaggaggaatcttttatgtattttgaatttattaataagacaaagttatgtgctggggaacatgctttaagtcatttggagtatgaatgtcatcaatatcatatgaaacatccattgattattactgatgaagtgctttatcaattgaaatatattgatataattaagaaatatttgtttgttgattatagtctttatacgcatgtacctgtagattcttctattcatgttattgaagatattcataagttttatattgaagaagaatgtgatggtgtcattgctgttggtggaggaagtgttttagatacagctaagggtgttgttttgatgttatcacatgaatgtgattctattgaagatattttaggatttgaggatttaaagaaggggcttgatattcctttctttgcgattccttcaacaagtggaaccgggagtgaagctacttgtgtagccgtggttagtcatcctgaaaaacaagtaaaattagaaattatatctcaacatgttcaaagtgatgttgctttcttagatcctttactgacaaccaacctcccattaaaaacaactgcttctacttctattgatgccttggttcacgctattgaagcttatagttgttcacaaaaaaatccattaagtgatacttatgccatgagtgccatatcacttatatcacaaaacttactacccactattcataaacctaaagatcaaaatttacgttttcaactctctttagcttcttatttagctggggcagctttttctaattctatggtgggaattgtccatgcgattggtcatgccttaggtgctgtttgtcatattcctcatggtgatgcaatgagtatgttattgattccttgtatgaagtttaatcttgatgtaaatcatgaattatatggtgatatcttactttatttaggagaaaaagaactttatgccaaaacaccccatgaacaattagcacaacaaacaattgaagtcattgaaaaattacttcatcaattacatgatgaagttcagttacctatttctttatctagtatttctgatttaaatgaacatattgaagatattgctcaaagagctttgaatgatggtgctttaatagttaatcaaaagtatgtaacacatgaagatattataaatatattggagggttattatggatattaaagaattagttgaaatgcaaagaaattattatatgacattacaaacaaaagatattgctcaaagaataaagacaattgaaaatattaagatatggatattagaacatcaaaatcgtattattgaagcattaaagaaagatttaaataaagatgcaactgaatcatatatgtgtgaaataggtttagtcttaagtgaaatcaattatcaattaaaacatattaaaaaatggtctaaaccaaaaagagtaagaactccattagcacaattttatggaacaagttatgaaacatatgaaccttatggagtctgtttggtcatgagtccttggaattatccatttatgttgtcaattgagcctgcaattggtgctattgctgctggaaatactgtcatcattaaaccaagtgcttatgctccccatgtttctcatattattaaacagatgattgaggaatcatgtgatgagaaatgggttgctgtggttgaaggtggacgtgctgaaaatactgaattattagaacaacgttttgattatattttctttactggtagtgttaatgttggaaagttagttatggaaaaagcaagtcgttatttaactccagtgacgcttgaattaggtggtaagagtccttgtattgttgatgatgataagagtttgaaattagcagcgaaacgtattgcttttggtaagtttttaaatgctggtcaaacttgtgtagcccctgattatttactgattaaagaagaacttaaagattcttttattgaagctataagggatgttatttatgagttctttggagaaaatccaattgaaaataagcaattagttaaaattattaatcagaagcattttgaacgtttatctcatttacttgaaaatcaagatattgtgattggtggaaaatttgatgaaagacatttaaaaatatctccaactgtagttgatcatgttgatggtgataactctttaatgcaagaagaaatctttggtcctattttacctattataacttatcataatattcatgaagctatccattttattaatcaaagagaaaaacctttagctttctatattttctcatcacaaaaagaagttcaggatttattattgaaatcttctagttttggtggtggatgtattaatgatacaattattcatcttgcgacaagtgaattaggttttggtggagttggtcatagtggtatgggttcttatcatggtaaaaagagctttgaaacattttctcatacacgttctatcgttaaaaaagcaacatggattgatttacctttaagatattatccttatactcctttaaaagataaaatgattcgtttatttgtaaagtaatttcattttttgaaaatcataagcaatttattcgtggtatagtaaaatatataataaattaagggaggaaagacaatgattaaaatcatgttatgttgtgcatcagggatgtcaacaagtttattagttgaaaaaatgaagaaagctgctcaagaacaaggtgttgaaactgaaatttgggcagttggagcaaatgaagtcaaagccaatgctggtaaagcagatattattttattaggcccacaagtacgttatgctcaaaaaacaattgaagcagaagctggtggagttccagttgctaatattgaaatgcgtgattatggaacaatgaatggtaaagctgttttaaaacaagctttagatattgttaataaataatttaaaatgcaagaaacagagtcatatctgaatttcttgcatttttttattaattattaacatgttgatgtggtgtaaatgaactatcatcaatagctttaaaagtataacctaaagcttggtaatgttctatgatctttggcaaagcttgaactgttgttgattttgcagctgtatcatgggcaagaatcataatattttgagaatgacttgctgttccatttttaattaattgactgactgccacattatttcctgaggcatctcctgtactcgcattccaatcataatattgatatcctctattttgtacttctttagctaaagtactcataatacctttacaataatgtcttgatactgtatttgatgctcctcctggaaaacggatatacttaggaacaaaaccaatttgtcctttaaccatttgtcctattttatcaagatcactaaaataagcagttgttgaagcataaatttgtttatagttatgtgtatatgtatgaagtccaatagtatgtcctttatcatgagcttgtttaataagataattatatttctttccatttcccgtaacaaagaaagttgctttggcattgtatttatctaaaatattcaaaatctttgcagtatttgctgatggtccatcatcaaatgttaaataaacaatcttatttccattttgtcctactgattgaataggtttattttcaacaacagtcactttctttgtatatttattttgattacctgctttgtcagtaaccgtataaataacatcatatgttcctacttttgaaagattgacttgtttagaattgacttctattttaggttcaggatcacgattatcttttgcttttataccagaaagataatttattttatgtcctacttctacagttaaatcttttaatccagttaatgtaggtttttcttcatcttttacaatttttatagtggcttctttttctgtttgattatttgcttcatcacttacaacaattataactttatattcacctgctttattcaatggatattcttctttaaaagcaacagttgtttttgtttcatccttaagatttgttatgaaatcttcaggttttacatttgttcctaagtcaacatctaaatctttaatatcaaatgtaggtgcctttgtatctacaacctcaacatctaaattatatgttttatcacctatttgatattcaatcgtatattgacctaaacgatgattatcaaccttagaactattaattttcacatcatctatagaatgatgcttcacttctttaataaaagactttgcatcaaaatcatcattaatctctattttctcaacacttttcttaaatacaattgatggttgattaaaaaaataaaacaatcctatacctatcccaataacaacaataatacctatacccataattatttttttcttctgttttttcatatctatcatcctcgttctctacatcttcattatatcccttttatatgacttttctaagaccatttctcttttttcttcattttatgacatataactcacaaattcattggtcactcataaatttcatagtatcttcaaattttatatcaaatattttagaataaatgagaacttgaaataaagggaggattatttatgttagttgtttatttagggattgtttttttaacaattgttatactcatagcaataaaaagaccactttatcaagcaatccttggtggtctcattatgttagttatactttatcaaattcctattggtgatgcttgtatccaagttactcatgtttttactcattgggattcttttcaaattctcatttctttgtatttaattactttcttacaaagaatgctagaagcaagacaacaaattaaattagcacaacaagatttaaatggtttatttcataatcgacgtatcaatgcaggtggagcacctttatttattggtttacttccttcagctgcagccatgattttatgtggtgatattgttaaagaggcgacagatggatatctagatccaaaagatcaggcttttactgcaagttggtttcgtcatattcctgaaagtaccttaccaacttatgcagctgtattattaatggctaatatatctggggttcctttatctgaatttatcattggtatgattgttcctatttgtgcattatcattcattggttatttttctatactacgtaagattcctaaagatcctggtgtagaaaggagtcaaaatagatggttggattttattcatttgtttcaacatttatggtctttacttgctattatagtttttattcttgtttttaagttatcagttgttagtgctgttttgattgttattgtattgtgtatttttatttatcatttccatattgatgaattgctaccaatgcttaaaagttcttttgaaaagaaaatgatactgaatacttttttagttttggtattaaaagaattgattgcttatactggagtattagaagttttaccagaaatgcttttaactttacctattccatcttatttagtctttgttatattgttctttgttggtggtattattagtggatctagtggtattattgctttaggaacacctatagcatttgctacaataccaggaggtatgccattaatggtgttattaatgtgtatatgtcatggagccagtcaattatcaccaacacatatttgtttagttgttgctgcagattatttccatgtaagtttaggcgatttgattcgtaaaacattacctaaaactttgttattttgtttcattgctattatctattacaatatacttattttgatttattaaaaaaatggctttttacaaagtcatttttttattctttataatcacatttttgacattgaatcatagtattctcactatcttctcgataatatatacctgaccatttacaaatactttgtaaaataggaaccaccgattgacctttagctgttagtgagtattcaacacgaggtggaatttcatcataagaatgacgttctatcatttgattttgaattaattctttaagcattgaagctaaaacagcatctgtaatatttcccatttcttttctgagttcactataacgtaaaacatcttttttagctaatacacaaataatacgtgatttccatttaccgccaaagatttctaaaccatattctaaaggacaacgaatatctttttctaatttatgttgatacatcttactccctccaatacaaatctattatataagatacaactataaaataacaagatactaagaaatttaatagtaagaaaaaaggacttaatgtcctctaatttatgttttctataattccttgagcaatagcttgacctattttttctaacttttgattatcattgagataatcaaaatcttttcctcttatgtaacctaattcaatcaatacagaagatacactgttatctcttaaaacagccaaagaatttccatcttgcattcctctatttttagaataatttaatttttcgatatgatttcctatagaagtagcaagtgcttcacttgctttattcttagtatatatctcaaaaccagatatatttgttgttttatcataatcattgacatgaattgaaacaaaatatttggcttgattttctttactcatatcacaacgtaattttaaatctgtaattttattatcatgtaaagcttcatctttatcccgtgtcaagatagctttgatatctgctttatcaagttccttagcaacagcctttgcagttgttaaagatatatctttttcataaagttcaccaatatttgctccaacatcatatcccccatgaccaggatcaacaatgactgtcgctttatagttttttggtttgtcatttttttgaggagttattgcttcagtttcaaagagtgacatcacatgacttacagcaaaacttatacctttatataaaccaaatagaataatcaagcaagccactgctgcaataataactcgatcaactcttaattttaattttttctttttctttgcagccattatctcactcctcacactatgcttattctatcatatttttatcccaacttaaacaacaaacaatttacaaccatgaaaaaaaagatttgattatttcaatcaaaccttaattttcatttttaacacgaatacgtgttatagccttacgtaaagcaacttctgctcttaaaatatccatatcatcattagattgattatgtaatctttcttcagctcttgctttagcttcttgagcacgtcgtaagtcaatttcttcaggtgattctatagcatttgcaatgattgttgtttcatcatcattaacataaacaaaaccacctgcaagtgcaaatttatatctttgtccatctttaatatagttcatttcagaaatatcaatggcacttgctaagggtaaatggttggcaagaattccaatttgtccagaagttgttcttaaattaagcatttcaacttctgtttctttgtagattcctctaggtgtaacaatctttaatttaaatggcttcatcgcttaaagttttagccttttcaattgcttcttcaatagaacctacattatggaatgcttgttcaggtaaatgatcccattttccttcaagaatttctttaaatcctctaattgtatcttctacacgaacatatttcccttccattcctgtaaattgactagctacagtaaatggttgagataagtaattacgtacacgtcttgctcgtgcaacagtcactttatcttcttcacttaattcatccatccctaagatagcaataatatcttgtaattcttggaatctttgtagaatttgttgaactccatgagcaacttcataatgttcttgaccaacaactaatggatcaagtgcacgtgatgatgagtttaatggatcaacagcaggataaattcctaaagctgcaattgaacgatccaaaacaacttttgcatcaagatgggcgaatgttgttgctggagcagggtcagttaagtcatcagcagggacataaacagcttgtactgatgtgattgatcctttttttgttgatgtaatacgttcttgtaattgtcccatttctgttgcaagtgttggttgatatccagcttgtgaaggaacacgtcctaataaggctgaaacttctgaaccagcttgagtaaaacggaagatgttatcaatgaataataagacatcttgattttgttcatctctaaagtattctgccattgttaaacctgtcaaagcaactcttaaacgagatcctggtggttcattcatttgtccaaagacaagtgttgttttatccaaaacaccactttctttcatttcataatacaaatcattaccttctcttgaacgttctccaactccagcgaatacagataatccaccatgttgagtcgcaatattgttaatcaactcttgaattaaaacggttttaccaactccagcaccaccgaacaatccaatcttaccacctttaacataaggacagattaagtcaataaccttaatccctgtttctaagatttctgtttctgttctttgttgtgcatatgttggagcacttctatgaataggcattttttctgttgttattggtaattctggttttccatcaataggttgtcctaagacgttaaacattctacctaatgtatcatttccaactggaacactaattggtttttgtgtatcaattgcatccaatcctcttgtcaaaccatcagttggacccatcgcaatacaacgtacaacatcatcgccaatatgttgagcaacttctacagttaaaggtgttccttgattatcaatttcaatagctgtatttaatgctggcaaatgatcagcatcaaaaacaatatcgacaacaggtccaactgcacgaacaattttccctatatttagcatatgttcctcctttattgcgcattagcgcctgcaacgatttcactaatttcattagtaatcgctgtttgtcttgcttgattatatttcaataataaatcttcaattaaatcttgagcattatctgttgcattttccatagatgttcttcttgatgcattttcacttgtaactgattccactaaatatccataaataatagattgtaaatacattggaattaaatgatttaatacttcagaaggacttggttcaaaaatagtaaatttttgtgtcacttcaatattatcaaattccttaacatctactggtaataaatcaataacgcgtggtgtaaaagttaagttattaacaaattcagtataaataatcttaatctttgaaatttcctgattacgatacatctttgttaattcaccaacaagacgaacaacttctctaaaatctaatgtagaatttaaattcaaataatcatgattatattcaatttgatgatgattcaaatgaccagcacctttactaccaatcatataaatcaaatcaccctcttgaatcgtttgatcaactgttttcaatacattcgcattgtatccaccacataaccctaaactagatgtaatcacaatataaacattctttcctttaggattagcctttaaatatggattatcaatcatcccttgattacttgctaaaatttctgcaacagtttcttgtaccttactataataaggttttaattcctctaattgatttcttgtttttcttaatttagaagttgcaactaattgcatagcttttgtaatttttttagtagactctacagatttaatacgtcttttaatagactgcatattactagccatagatctaaccttccttattcacttgtaagaatttttcaacaaaagccccaataacttctttcattttaacactcaattcatcactaatcactttttgtgtttgaatttcttcaataatatcactatgatttaatttcatttcttgatacaattctttaacaaactcagaaacttttttaactgctaatttcttagtaaaaccatattttaatgcaaataaagaaataacttgttcttctacactacgtggagaatattgagcttgttttaaaacttcacgaactttttccccatgatctaatgttgcttttgtagctgcatcaagatcactaccaaattgagcaaaagcctgcatttcagcaaattgtgctaattcaagctttaatgttcctgaaacttgtttcatagctttgatttgtgctgatgaacctacacgtgatacagataatcctgtatcaatggctggtctaaatccagcattgaataaatcttgttgtaaaaagatttgtccatctgtaatagaaataacattagtaggaatatatgctgagatatctcctgcttgtgtttcaataattggtaaagccgtaattgacccaccaccattttcttcatttaaacgacaagctctttctaacaatcttgaatggagatagaaaacatcccctggataagcttcacgtcctggtggtctttttaataataaagacactgtacgataagcaaccgcatgtttagataaatcatcataaacaattaaaacatcttttccttgttctaaccattcttctgccattgcacatcctgcataaggagcaatatattgaactggtgctaattcactagctccagctgcaacaattgttgtatattccattgctccacctttacgtagtttttctacaatttgtgcaacagtggaattcttttgtccaattgcaacatagatacaataaatattttgtcctttttgatttaagattgtatcaatcgcaatagcagtttttccagtttgtcgatcaccaatgattaactcacgttgacctctaccaattggaataattgcatcaatagatgtaattcctgtttgtaaaggttgatcaaccgattttcttgtcataaccccactggcaactctttcaattggtttcgtatgaacataacgaatttctccttgtccatcgataggttgacctaaaggattaacaacacgccctaataatccatcacctactggtacctcaataattcttccagtacgctttacttcatcaccttccttgatagttccttcactaccaagtaaaacggcaccaacacaatcttcttcaagattcatgaccataccataaacatcattaggaaacaataacaattcacctaacatagcattatctaaaccatgaacaagtgaaacaccatctccaacagtcataactgttccaacatctttagattcaatttgatcttcaaaatgtttaatttgttcttttattaaagcactaatttcatctggtcttagatccactatcttcacctactttcttaataattcttttttcaatgattccaatttataagaaagtgaatcatcataaatatgattatcaacttctactctaattccaccaatcaaagctgtatcaataaccatacgcaattttactttctttccaactttaacacttattgcattttcaattcttaataattccttatctgataactcataaggtgtataaactttacccaccttaataccaaaatagtcataacataaagattgaaattcagcacaaatttcacgaatataagcaattcttcttttcttaattaataaaagcaagaaattatatacatatgtaccaacttgtttttcaaaactttgcttaagaacactcatctttagttcatctgttaccccataatgagaaaagaaacgtacaatcgatgaatcaacaaaaacttcttgtactttttccatatcctcttgataagctttaactgcatgttcttcttttgctatttcaaataaagattcagcataacgattggctatggcattcattagttcacaaccttctctacaaattcttcaaccaattcttgattttgttttgtattcatttctttttgaataatctttgttgcaacttcaattgcaatatcaacgatttcttctttcatttctgtttttgcttgaaccttttctgcttcaatttctttttgagcttgttcaattttactagcagcctctttacgtgcttcaacaataatatcatcacgttcttttaaagcatcagatttcgctctttcaacaatttcatgatactctctagctgaaacacgggcttgttgttcgctttcttgcataaattttttagctttttcattcatatcttttgcttcattgatttgtgtttcaataaaatcagctctcttagcaaaataagcctgcacaggagcccaaagatacttcttaaaaacaaacaacatgacaccagttgaacataattgaacaataagtgttgttatattggggaataattttccagcaatatctatatccataatttattcctccttaactttcaattatttaatgaagttagggaatacgaacattaataagaatgaaatcaataaaccatagatagctactgtttctgataaggcaatccctaagatcatcattgtacgaattttaccttctgcttcagggtttcttcctacagcttctactgctttactagctgcaatcccttctccaattcctgtccctaaacctgcacatacagcaatccctgctgcaattgcaattaaaccataatctgtcattttctatacctccaaattttctttcttttaatttttttattctttactagttattctgcttctatagcaataagaatactagataaagtcacaaagactaatgtttgaatacatcctgcaaagacatcaaaataagcatgtaatacaggagctaagataggtcctaaaaagttaactggtaaaatcattccagatagccatccagtaaactgatagaccaatcccattaaaattgttccacttaatatattaccaaataaacgcattgataatgatattaatggtgatattgcacttaagatattggttggtggccacaccaattctttaatataggttaaaccaccttttttcttaaaggcattatactgaattaaaataaaggtaattaatgtcattgctagagtaattgaatagtttgatgttggtgcatcaaatccaattaatccacttaagttagcaacaattaaatacacaaataacattgcaaagtaaggataatagctcttttcaaattgagaaggcataattgatttcatataattataaaccatctcaactcctgtctcacatactaaaacaataccctttggtttttctaatggatcagccgccatgactttctttcctgcatagataaaaaataaacatagcgcagttataataatcaaagaaaaaaccaattcaacttgtaattctatatgtatgccagataggaacgttgaactaattctcattcatctcacctcctttatgaataaatccttctatataaattgttatttttatgacaagatagcctaaaaacacaccaaaaatatgtataaaatccatcttaacagcaataaagaaacctaaagcataaaataataattttaaaataaacataattgctataattgctgtagacattgaaaactttaatattccttcactcatctttatattcattaaaaagatgatgatatttataatataccccaaaataaaaccaaatatataagatatatcttgtaaacataaactcattatcaatatgattaaagaagcaatgaaaaaaacatggactgatctttttaaaactgttttttcattcatgttttccaactcctaacaataatttaataacatatataaatgataacaacaaacatatcaataaagctattggctgactatcaaaatactcatctatttttaaaccaacccataaacaaaagagaaaaactccaatcacttttagtcctaattctaaagcaaataccaagtcttttaacataacaaaaaaagagttatatgaaaaagatatcttctattgagaatattgatgtcttgatcattcatataactcactcctttagcaatagtattacattacgattataccgttatttatcttttatagcaatatgaaaacattaatcatcagtaccaaataaacgatcacccgcatctcctaaaccaggaacaatatagcctttttcattgagcttctcatctaaagctgcaacaatcaaatctacatctggatgattcttttcaatcatctcaattccttcaggagcagccacaagacatgccaatttaatgtatttagcaccacgttttttaatattttgaagggctgcacatgcactaccaccagttgctaacattggatcaacaacaatcacatcggcttcatctaagcaagctggaaattttgcataatattcttctggttctaatgtttcttcattacgagccattccaatatgtccaacttttgccgttggaataattgttttaaaaccttcaactaaccctaaacctgctcttaagataggaactaaaataataggtctaactaattgttttcctgtcattggacaaattggtgtaacaatttcaatgttttttaatggtaatccttttgtaacttcatatgccattaacattgctatttcgtctaagttttgtctaaactcttttgttccagtttctttatttcgcataattgttaatttatgctcaattaaaggatgatttaatattgttgttgccatagttttccttctttctatttaatataagttttcccgttatacattgtgactttatcagttaatgctttgactcttgctatacattctgttttaacttcttcagtttcttcattctttaaacgataagcaataatctttccaacttctctaaaatcatcttcattaaaaccttttgttgtcatagctggtgttccaacacgaataccgcttgctttaaatggcttttcagtatcaaatggaattgcatttttatttgcagtaatattaatttcatcaagtaatctttcggcttttttaccactcataccacaacttgcttttacatcaattaataataaatgattatcagttccatcagctaccaatctaaatccttcttcttttaaagattcttctaaagctttagcatttttaataatttgtaaagcataatctttaaactctggttgtaaggcttcatagaaacatgcagctttagcagctatgatatgcataagtggtccaccttgcataccaggaaatactgctctatcaatatctgcagctaattcctttttgcacataataactccaccacgaggtcctcttaatgttttatgtgttgttgttgttacaacatcagcatatggaactggtgaaggatgtaaacctgctgctactaatcctgcgatatgtgccatatcaaccataaataaagctccattatcatgagcaattttagccatatattcaaaatcaataattcttgaataagcacttgctcctgctacaactaatttaggtttaatttcttcaactttctttttaaaatcttcataatcaatagtttctgtatcttttttgacaccgtaactataaaattcataattcattccagaatagtttaatggatgtccatgtgttaagtgtcctccatcagctaatgacatacctaaaaccttatcgccatgctctaataaagctaagtatactgctgtattggcttgagctccagagtgtggctgaacatttgcatgttcacaaccaaataattcttttaatctatttcttgctaattcttcaacttcatcaacaaattggcatcctccataatatcttttaccaggatatccttcagcatatttattagttaatactgaacctgctaattctaagatttcttctgaaacaaagttttcagatgcaatcaattcaatgttatttctctgtctatttaattctctttcaacactttcaaagacttccatatctctcatatttattccctctctaatttcatcattttttcaattcttgcatcatgtctaccaccttcataatcagtgtgtaaccatgcatttaaaatttctaaggctaagccttccccaatgactctttgccccattgctaacatatttgtatcattatgcgctcttgttgcttttgcactaaaaacatcatgaactaaagcacaacgaatacctttaactttattagctgtaatagaaacaccaattcctgttccacatacaacaacacctttgtcgcaatcccccgatgcaactgcttttgcagctttggctgcaaagtcaggataatcacagctttcttcgctataagttccaaaatcaataacttcataaccttgtttaaccatttcttccatcaatacgttttttaaacgatatccgccatgatcacacgcaactgcaattttcattttaatacctcctctatttctttctttgttattttaccctcacgtaatatttttatttcactacctgtgacatctacaactgtacttgcaacattatctgatgtttttccatcaacaataatatcaatacgtccatctaattgttctaagacttcacttgtacatgttgtattaggatgattagataagttcgcacttgttactaacattggtcctactttctttaataatgaaagaacatattcatgatctggaatacgaattcctatggtttcttttccatttgtcatcactggatcaacactctcttgttttttaaaaacaagtgtaatcatccctggcataaaagcttcaataatctttctagcatcttcactcacataagcatatttttctatatcttttttgtcagctaccattaatgtaattgctttggaataatccctattctttgcttccattaacttatccaatgcatctcttgaaccaaattttacacctacgccatacactgtttctgttggaaatgctgcaactccatgattttttatcacttcatatacactttcaatatctttgtttgttacaacctttgtcatcttccatcaccctcggtgatattctaccataatttatataaaaattatagaaatataggtataaatcattatttttaaagaaaaaaagataatgaaatatcttccattatcctttgcattcattttatctaatctttttctttgctatctgatatatcttttccagacttgctttttcaataagtaagtcaaatatcttttcgtactgctctacggatagattttccagaaatcctgtttcagcttgtggatatgtcttggtaaacaattttaatacgaaatctcttttaccaaactttgtaccttcagtcagtccaagctttttcccttcagccaatccctcttgtagcccttcttcttttccttcgtcacgttctcttttcattcttgcctgtcttgctcgcttgtttaaatcacggttgaatgccatgtcctgtagaatcatatcttcattaaaatcatctgccttcttctccatgatatccaccaccttcttctttaacttcattatatcatcaattctatttttttatatatgtaagttttctaattaaacaatattttctaagaatttttataaatagagatatgaaaaaggaagtttcttttactaaaaacttccctttttttattccaagtttacccttttatacaatccgcagcttcatatatcttttctagacttgctttttcaataagtaagtcaaatatcttttcgtattgctccacggataggttttccagaaaccctgtttcagcttgtggatatgtcttgataaacaattttaatacagaatatcttaatccatcattcaatccaagtttttttccttcagacaatccaagctttttcccttcagccaatccctcttgtagcccttcttcttttccttcgtcacgttctcttttcatccttgcctgtcttgctcgcttgtttaaatcacggttgaatgccatgtcctgtagaatcatatcttcattaaaatcatctgccttcttctccatgatatccaccaccttcttctttaacttcattatatcatcatcgattccatttttaaatatgtagatcgctgtttctagttcattgaagttctctaatcccttttccttctttaggatattgatatagggtagatatatgtagattctcgtgatcaagttatgtttctcctgattccctgattcattctgactgacatacctgtctatcagtaccagattgtccttatccagatcatcgatgaatatcagctgaaacacatgatgaatgttggtgacatagtcatctcctctcttttgctgttctacgagtagtcttgctccatagatctggaacctttgatactgttcctggtcaagtgaggaattctgcatctcgacatcacagatttcaccatcttcattggtgactctgatatccagaatcatatccttatcttcgacatgctgaggattgagatcgggattcaagaccttgagtgaatggcagtcaatgccagcgatgttttcaatgatgagtttaagaagatagatagaatcaggatcctgatcatctctcaaggtatacttgaacaaaacatcatttttaaaatcaacaattttctttcttttcattatcataaaaaagccctcctacttctatatacgagagtaagagggcaaatttcttttttattttctacttcacataatttcacataaaatattatatgtctatcaacaaaaagctctactttttgttaaataattaattaacattatacttattcttgtattaataaaacactattttcaaaatcattatctgctttaacaatatttacatgactacccttttcttcagtataaataatctctttttcattaagtacttgtattgtatagataattctatcctttatatgtttttctttatgagtagctgtattgtaaatcaatacccctttatcttcctttaaataaagaagatcaccactcacttcatacatttcataaacattatccaatatttttacttctttattaccatcaaaacaataaattcctttatcttttgctttagaataataaatattttgataagaggatttgaactgataaatgagatcatttgatataatttttgttttctgattttttatatcaaagtcacataagtcaagattattattaataaaatagatatgaccttcagtaaataaaacggaaccatttgctaatgagaaaatcattgatgcttgttgagtattcatatcttctttataaacatatttatctgttgcataataaatataatggtcatccatataaaattgtcttgcagaattatcaattattggggcatctatgaaagaataatcttcttgatacgagtaaagtaatgatgattgaagatgtgtatcatgattatagaataacttaactcgtctttttgattcatcatatttataaatttgatacccttcctgtttatatacccaaaagtaagtgtattgatcattcatatagaaatcactaatataaccatcatctgtgtatgttggatctttaatgtatttctctatttgtagctttgaatcaagtgttactaaactatccatatgagagtaaacaatctgtccattagattcaatataattacgatttttatagccagtttcaacagtcaaatcttgacatcctactaaacagcaacctaacaatacaagtatcattaatttatttcttaattttctctgttgatgtgtatagtttaaataaaactttcttaatccaataagtaatatacctataaaaataataagacccatccataaaataatatgacgacaagcaaaaaatgtttgaatggccatctcattttcactatgtttattaagaagcctaaattcctgaccacgtatatatccactcgataaaatgaaagataatggattaggaattatataaagtagcttatgactaacaagtaatgttaataaaacataaaagccaccttgaacaaaaaacgctataacaaaacgtttaaatacaattgtcaatatccatgttaaagcaactatcgaataatatcccaatattcttatgattctttctactattactgctatatataaggaaatatgataaggtgcatgtttaaataaagcaatattttgcatatatgctgtactatgttcaaaagaaccatttatcaaataaaataaatcatgtgagattaaaaatatgaaaatgaaaattgtacttataataagagatagttttattttggtaagaaacactccttttctccctctgattgttgaaatcataacaggatatgtttcttcttcatattccacaacaaaaactaaactattaacaatcatgagaataataatcaatataatatcaacatattcatcttctatcatagcttgccaaccacgactatcaaaaataataaaatctttttgattttcttgaacatattggacttgatcatagaaatatgtaaaagcttcttgtttatctaaataactcaaagcatcattcatttctttttttaattgactgacttgatttgcattaacatgatatgttatgagttgattactgatttctattctcttttgttcacaaatattaaattgatttttttcttgatttatttgttttatatcatctttactcaagtgaccttgatatctatcaatatattcttgatagtatttctcactattaggattagaaaacagataggctgtttttgtctgagtcaactcaaaaaccttaaaacaacataacaaacaaagaattaccataaatgctttatactttcttagtttccaaaactcatatctaagtttcataagaaacaccttcttttcctattagactcatgatagctaaaataagattgtagcctacaccaataagcattaaccactgatatgtaaacatacaaagtggtcctatctgaatacaatctctttttataaacaattgattctcttgtaacaaagcaaatggattgaatacctgcgtgtcattagcaacaacaattaatcccaaaataatcaatgctgataaaaagaatgcaagtatatagtgtgggatgtattttgatataacctgtataatttgtacaagcaataacatgatgattaatctcattaaaacaattaagaaataacactgaagcatattacaacttattgaggacctatagaaatctttaagggcatataagggttcaaataaaccatgaaaaccataaagaataagaaatgttaaaagttctgttatagaaaaagctataacgactatcaatacaaaagatatcatatgaacaaatcgaattttttgaaaatactttctacctttaatagatgtttttaaaagaacatccatatgtgagtctctttcatttgatatcattaaaacaactccaaatataacaacaaaactcatcaatataattgttttatcataatgaaataattgattccaaccaacaatataatcataagttgttatttgacgatccttgtactcattataaagaaatgtattatattgctgttctacattttgatttttaaagtaatcaatattatctgttaaaacctttaaatatgtctgcatatcctgatgataagtataacgactgcgcatatcatcatagatactctgtaatacaataatatctccttcttttcccccagacttataatctttatttgtttcattggaaacttgttcaatcaacgtacttagtttagtaaccttttcttttgtaatcttacccgtaaattccaaagcatagtatttttcagcagtagacagttgcttatcaagaaaatctgttttatattgaaaagctattaatccaatattcaataaaataaaacctataaagacaataataaagatttttcttacaaacagttttttccattcatattttagtaagttcatatatttacccaaaataatacatatagacttcttcaagccttggagcagtcttttgacttccttcttcacatgttccaatatatcttatacaatattttccattttcacttaaaacacgtgttattgtatgagatttttcaaattcacgaaacatagagtcatcaatagtaatctcccaagtttgatctttgacttctgataatagattttctgttggtaagacttttaaaatttgtccatttttcataagaataacttcattcgcaatagattctacatcttctaaaatatgtgttgctagaataacgattcgatttgttgataattgtgaaataatatttctaaaacgcattctttcttttgggtcaagaccagcagttggttcatctagtatcaaaatcttaggatcattcaataatgcctgagctatccctaaacgttgtttcattcctcctgaaaatgtcttaatcttacggtttttatcttgaataagattacataattctagtaattcatctaccttcggttcaatgatatctttctttaaccctttgagttcactcatataatataaaaaatcaatacatttaaattcatcataaaagtgtggatattgaggaagataaccaatacctgaaagatattcatcgatctgtgaatatattggtttatgattataaataatttcaccttcattgggtgatataagtccaacaattgtattaattaatgttgttttacctgctccattaggccctactaatccataaactccattgtttaatgtcagattaacattaattaaagccttcttatccttatatgtcttacatatattttttatttctaacaatgtctccatcttactgtactacaatcatacgtctataaaatcttttggatcattattatcaaatataatcaattaaaacgtatgatttcctttctctattgatttattctccttttattcaacaacaattaaacgtaattcagacattagacttactatcgcatatttactttcactacaatctaaaataagaaaataaaatgtatgttttcctttttctatattatttggtaattgaatatcaaattgtgataatccatattcttgccctttataatctaaacaaccaaaaccataatcttgatcaacagttaaaaattgattatctacaaagaaatatattgctcctttttttatgtactcactcttaatcgcaaaactccattttaaatcttcacctttttttaaagggatagctggagttttcataacttgcaaatctccatcaaatacctgttttaatttatttttatcttcataaccataataattattttgaaaactacttgaattatttttaacagtttcccattttactttttttccttttttattagaaacaagtgctttgacatcttgagaacattcaaaacgtcttactgtatgagctatattttgacttttacgataatcactataatcagggttatcaacattttctgcaacataattataattatcaataaatataactgaaaaattatatgtttgatttttcttcatacctgttgtttgtacgtaaaacttattatctttaaattgttcagtttctattttcattttcttctgatattcaaaatcaccatttttgtcaaatgaaaatggaacaaattgatcatctattgtaaccattatcatatgatccaatccaattggtgatctttcatataaaattgtcaattcaacaagatcatcaataacttttatatcttgtatacctaatgttgaagaatatccatctgtattaaataattcttctgttttttcttctggtttatcctctttaactggtttttgacatccaactaatagtgatagcaacaaagcaaaaactatcattcttttcataactatacctctttccctttttataatcttaaaaaatcaagtttcttataaatatattatatcatggattcattgttgctcataaaaatgtcttagctaaaaaattttattgtagtaaaattaaattatatatataaacagaatatatcattaaaaataaatgacttctttttcatagaaattaataattagagaaaaatctttaaacaatataattatataaatagcttgaggttttttaatatgagaactattcataaatctagtttttaatctatagtgaatatcaaaaagaaatatggatatcattttcaatagaatcaccatatttcttcatgatatcaaagtgattatttcgctacataactccaatattaaagaaaataagagcataatgtttacaaatcaataatttttatacctttaaataataatacttaaaatatatctatttaaaatcttaatagtttttcaacatcataatgacatattaataacgttgataatattgttggtgctaggtagattcctaaaataaagataatacttaaataaagtgttgtgatagtaaatattttgagattaatgcctaaaatatatactattaatttagatgtaagtaataaacatataactgatattgttgtttttactatagtttgtaagaataaaataagcatcattttaaatatctctttatttgataggccatttgcttttaatacagttaattcatatttttgattattaattgtaaaaaattgacttattactaatataaatataactaagctacaaacaatcgtaacaaatgttgataagttagatgtatatatttctagatttgatatttgagctaaatatttatcttgagatataattgttgaatataatggattaatttcgttgattttatctgttattcctaggaagctttcaaaatcatttaattgtaataaaactgcgtttgtttctgattcctggaaatattgatatggaacatagattatatatgattgttgtgactgggttaagaaataatcttcatataatacaccttttatcttgaatttgtttttagtaagattcaaattatctaattggatatttgaatctttatttatttttaattcttctgagagtctgaaagaaagatatatatcacctgttttattttgccaattggtatgtatcttttctgtttgataatcataatacgatacaacttgtattggtttatttaaagaaatctttttttcatttataagaagctcgttagtcgtattcttataaactggataaatatttctaacaccttgaatacgacttaataaatcaatacctttatcggaaataagattaattttattttcaacaagtacctcattattagcaaattgattgagtgactgcttatattgagaagctaagctatccttcatagcatatagaaaaatacataagaaaattgaaaaaataggtataactgcaaagataaacttctctaattttcctttaccaaattgaaaatgagtataccatttataaaactttgaagaaatctttgtctcttttatatctgatacaactatatctttatttatggtttcatctaataaaatctggttattttttaaatgatagacaatatcacaatcttttaatatattctgattatgtgttgcaataataaccattttaccatcatgagcaataccttttaataactcaataataatctttgtatttgtatcatctaatgcactcgttggttcatcagcaataataatatctgattcttttattaaggcacaagcaatagctaatctttgtttttctccacctgaaagaacttctgtttttgtttgtggatcaatagttaaatgaactttttctagtaaagtatttgctttttcttgagtgtattctaatcctgctattagacaatataatttaagattttcttctattgttaaatattcatgtagattcttatcttgaaatacaaaaccaatttttgacttacataatgtagacttaagatgatcatcagtaatatcaatatttctaccattgtaagaatattcataccctttagcacatgatataagtccaataatataaaatagtgttgtttttcctgaaccactcttaccattaattgcagttaattgtccatctggaattattatttgactatctttgaaaacaatctgttgattataggaaacgttaatattcttaatttcaatcattatttagaacgtaattcttttatgacgtttgtctttttaaaatataaataatttcctatataacagataatcataataaccaatataacaatgacatttatcaataatgtttttaaatcatattgatatggaactatctcctgttcattcatttctctaaaataattaaatatgcataaagctgttattggtaatgaacatattaatgtataaattaaatcaattaatggtaacttgtagctatatgagattccattggcctgtaagaatgacaattctttttttctttgatgcaatgtataaagatatagtaatgaaataagtattatgcttatacttaagatgataattggttgagttaaataactcttttccagttgttgttgtaaagattgtcttgtttcttttgcagttatctttgtttttacatagattggtttattcaagctttcaatagcttttttcacatagtctaaatttttatactcatcaaccttaatgacatagcttgaagtctgtgttctgtattgaaaattagcatccttaagcaacgcttcatcaatatatgcctttaaatttttcaatagtttttcatcattcatcacttcatcatgaagcttttgcatctgcctataatcgataaagatattttctccaccacttatatcatagaactgataggaatctatattatattcgtatattcctttaatctcaaatgttctatttaatgtcatttttaacattggatttgtttctgctggttcagaagcaggattccctgattcgtctatgatatatccttcactatgaaaatatcccatcaatacaggtatagagaatgaaatcttggtatgatctaatttttcaattcctaaacaatctgccaattgacttgaaataaatataccatctttcacatctttatctacttctttacattttgatactttttcatcatagagacatgttgaaacagctatatagttatatgcttgttttaaaggattgtattttttatctttgtatgtcacttcattaattttttcttttaattccttatctaattctacatcttctccattctcattacatatatagttattattcaataacttatagtatggatacatttctttaatatgattaatttgttgaatttgatctactacatctttattaaactttacttgataatctaagaaaatatttttatctgtcacatctattaattgctcattattaacgatgaacaattcatcatccaaaagttcattcaatgaattattggccactttttgtccagtttgcaccattattgcattttttgaaaaattatataatgaccagactgaagctatcaatatcaaagcataaattataaaatgatgacttaaatgaagtaaagtatacttgaatggattgaatctttttatctgtctttccctattttctatactctttaaagactctgttttcttcagttctttaagcttcatatcttctatctgataaatatgatctccattatatagatctggatgatgactagctattacaatcattaaacctttttcttttaacttgtttaagatttctacaatttgttttgcattattatcatctaaatttgcagttggttcatccaataatagtagctgtggttcttttactaaagccaatgcaatagccaatctttgtttttctccacctgaaagacttttacttttctgtttaagtttttttaaatctatacaaacatcatttaaaagattctctactaatgccttattatatttcttccctgaaatattaaacattgtttcaaaattatccttaatgcttaaatcttctattaggttataatcttggaaaacataactgatataacttctttttatcttattataatcattttttttaatcagttctccatttaaatgataatcatatcgattatctaaatccaataaacctaatacattaagtatacttgttttcccagtaccactttcacccgtaaatatagtgatttcataaggattaattgtcacatttccatcttcaacaattgaatattgaaatcgtatattcagatttttaatctctagcataactttcccctccttttgttattataatgattttaaaaaacgctttctatatattaatattaccacatgcagaaaacatgtggtaatattattgaccatttgacttaatatagtatagttgcagataatgttactgaatcttaaacttcataagaagttatataagatttcgcaccataatacactctataattacctgttccagtttttttaatagctccatgtgataaagaggtaccccctccagagccagaactataccaagtatcattaaccgtatttatagttctatcactaccataatcagtagctgtacctgataattcataccattgattagtacctctaaagctatgtacatctgattttgcacctattgtataaatggaactccttgtacttgcagctacatcattgtaactacccataaaacaaaatgatcctactaaaacaaaagctaataacattttacaaatttttttctttttcatagatattgacttattgacgttctctattggacagtatttataaacaagaattagactcaatgttccaattacgatttcagtccataattgatattgaaaaaatcatctattactaaaacaaatacaaataaactcatatatgttaatatacaattaaaatatgttttactatgatatcctcctaatattcttctcgaacttgatataactatttcataaataattgcttctataaaatgatttgttacaatccctataataaatattaatattgttccaataagtgttgatatcataagtcttgtactatagagatatatttctttatcttcttttaaaacatgatttttttctaaataatcaacgatattttctgaaagtttatatatcataatgaatcaaagattaatttcattaatcaaaaaaatgtaactcatcttaattcatggaaacatgatataacctatatattttcttacctaaaaaaatatattgaaaaccataaatatgatgaagcattaaaaacaatatcaatatatactgacgttttaaataactataatttattagttaataccaataatgatattttaaattctgtattaattcaatataacgatattataattaaaaataatattcatttttatataaattcaaaacaaactaatattcctttaaatgaagaagattatcgatggatcttagaaactcttcttgaaaaagctattaaaaattgtgaaaaccaaaaagaaatatggatatcagtattacaaaaagattcaaatttctatttatcatttgaatttgactgttcaaaaaatacgcaactttcattatatgaacagatttcttcacacttagacaaatataatggattgatgaaagaagtatatgaattagaaaaatacaaagtcacgattctaattcctttactataaattataatattatctgtaaaaagacttgttctattatgaatgagtctttttactatgattatattttttaactcatatacagttttttcttttcaattataaaaccaataattatcataacaatacctatacatatttgacaaatccaataggtcattgataactgagaagttaatattgttggatggaaaagaatatacggttcttccataataaagaaatgtgtaaataacaagataaatatgataattgaaatcaaagttattaaacaattcttaaacaacatagttaatccataaaatatacaacttaaaattataaactcaaatatcaaacctagtatcaaataaatacatccatctaataatatataacttataataaaatatggaaacaaagcaataatatatataatcattgcataaaatataaatcttattcgataacgactatctatactgattaatgtttctactaaatcactatcaatataatttctaaacaaaagccatagataaaatactataaatatattgagatatctttgagaaatcataaaataagttaattctttttgcattggattatcaatatattgtatttcagaaatacaataaggcatgaaaatacaataaatgataactaatggtaaaatatacatgaatatatgagttttcatttctaagaaaacaagtttaatatctttactcattttaatcccttcaaaagatacatataaccatcttctaatgtttcttcacaatattctctttgtatattgtggatatcatttaataataatattcttgtatatttttgattatctttttcaaatatccttatttgataataatctttagcagacatattcaaacattcatctaaaggtatttcaacgactttatttttagcttcttgttttaagttctctaaattatcgttaaaaataatttcaccattttttaaaacaagaacagattgacaaactgattcaatatcttcaacaatatgagtagataaaataattggacattgaccatgtaattgtgataaaactgatttaaatcgtaagcgttcttctggatctaatcctgttgttggttcatcaaataaaataatatctggatttcccattattgcttgagcaatacctattcttcttatcataccacctgataaatcaccacattttttatctagttcattttccatatttactgcctctaatactctttgaatttcatttgctcgattatctttatctatatctttcaaacatgcaaaataattcatttgttcaataagtttcatttctttaaataaaccaaacttttgtggtaaatatcctatatgaatatcttttaatgaaacaatagtatcatccttattcttataaacaatttctccttcaccttgaataatattcgttattattcttaataaagttgtttttccagaaccatttggtcctaataaagcataagtttgattatttaaattcaaagaaatatgatttaatactttttttgttttaaagcttttattaacatttctaatttctatcatacttaacctccatagcctctaagaatatctcatcattttgataattagtataacctaaaccatagtcataaaattctttaataaattcttcagctttcattttatcgagtaattgttttaagtgtttaatactctctataccttcaggtgtttgactttgggccatttgataaaactgtaaaaaatcatcttttgcttgttgcatatcttttaaaataagactactttttaaacaataaacaatctttgaatgtgtgctcatatcaaacatttgactcgctattatttgttcagaagtaataattccatccttagcaattatataattatcaaaaatagcaagagtatttaaatcagaaaaataagttaagcttttaggctggttaataacttttttgttttctaataatgagctcattttataatcactaagttgttttaaactttcattataatattcatttaaggtctttaatccttcttcttttgtatagagcttcccataataagtagggaatacattcataataacatgatcacctttttcaatttgaccaccaaataaagttatactatcagcctgaccagaataatgataaggtgattgttctgttatatttgtaataacaggatagttagctttaatatttaggttcatttgagtagtttctattttattaaaagaattatagccatattcaccattgatttgattattcttatcatcaacaacaaatgcaacttgatgttctccactcattggataccaaggaaaatatcctggtaaagccactgcttgttcatttgaataaaatgttggatgatatcctgaatattctatttcaagttttgcttcttgtataggttgtttaaaggttatatgaacaagattatcttttctatcataattaagttcttgatgagatattaacttttgaatatcataaccagaatacaaagtaaaagtaaaatctgttctttttttcttacttgttaagagcattgttccttctacatataatttctcttttaattcaatatcaaaattaaaattaccaaaatgataatcaactggctgataactattatatggttcttgataagcacctctaacttgtctcataagttcactttttgattgctgagtattcaatctactttgaggtcttgctgaataaacaatacttcctccagcaatacataatgttataataagaacaattgttttctttttacctttatatctttgcataatacatacaccaagaaaaataattccataagcaaaaacaataaaccaacgatataattcatcttttaatccatacatataatccattgaaaaatcatctgcttgatataaaaactgaaaaggtcttaaaaatatattaaaaatattatctcctaaatcaatataaaataatggactaattattaataaaaataaaataagaaaaatacctgctttattataacttaaataataagataaaagactactaactaataaacaaatacataatggaaagaaaatattgagaaagaaagaaggaatatagatagaaaacaattgactagtactatgattgttaaaagctatatataagatcatcaataacatgacaatacttatacatactaataaaataaataagataataatagaataatatttatgtttattgtttgtaacatctaaaacttcatctaagtcattcttcttatcatacgttaaaaacataaaacatataattgtatatactgcacaaatatagaaactataattacctatttgttgcatatacaacaatgtatctacccctatagaactataatagaaagaaaaaccaataattaatccaattattccaataacacctaaaagaagcaactttatttttataaataatttaaattgttgaaacaataactcattaatttttctcatactttacacctcttttttgtaaatgctgttcacataaatattatatccttgctgaataaataaaggtgagaaatctcacctttaaagaatttttactgtaccattacctgtttctttacatgcaccagatgtacataatctaattttatatttagatataatatcttgtggctcatcataactttttgttttacctttaggcaaactaaactcatattcatttgtataaagtgaagtatagtatgcagcataacaatcaacatcaatataattttgagctgatgtattagtagctgaaaatcttgccttttttgaaagacctacttctccacttgtactataagattcaccatacaataaagatgtactagcggatgttgcccaagctgaaaccattggcattccaagtaatgtgactaataaagaacttaaaataatagttgtaaatttttttatcataataattttctcctttctttaatattttatgaagtactactttatcttttccattggtatcattcctccttaaccgttttatctatttgaaaaaatacatacagttttaaaattttttatctatgttttttctatctaaattcagtatatcattaaaaggaattaaaacaacgcactctttttgtgcatttttttccattaaaataaaaaaatttatacatatttaaaaattaattaaataaaatttatcttaaaattaaaaaacaaatcttttctttttataaaagatgagatttgttttttaattaacaataaatcatagaatttacacatagcttttcttttgtttatttaatatatctacatatattgatatgtattttaatcttttttcaaagttattactcttatcatagaaatcacataataattctaatgtgaatttttctaaatcttgatcatttgtttttttagatgcttcatatacttttaataaatgtttttcttttctttcatcattagcatttgataaatatatttgatatgcttttatcattgtttccatatattttgttggttcgtccattgtttctctagctaattttatatactctcttgccttatctatttgatttaacttataagcagcaacagacatataaaaatatatgcaatgcttattaaattctaattccaatgcttcatcacagtattcaaatactttttcatatttttcagaacgcacatatccccatatcaaattattatatgtatatacaatattcattttcatatttaattccttataagcctgtatacaatttatgcttattctttcaaattctttaaagtcaccatttctatataagattctagctatattaaaatttgctgaaacaatccttttaagattaactgtttgagcaaataaagttcttgccttctctgtatattttaatgcatcaaaattggctccttcataaatttgtgttgctcctatatgaaaatataacatcgattcagaataaagatttccaccatatttcaaggcaattttataattatttagtgcttctaaataatattcattcatatagtaatatccacccatgtaatcataatacaattgacactgataatcttctaaataatcaaaatattcctttataaaaacatacttcttagaaatatttttttcacctattaacgtgtcataaatcatatgagctaagatatacttaatataggaaaacgatgaacgtatatattgatgataagatttaatttttttaaacgagacaatataatctcttaaatatatgatatctaaatagaaagacataaaatctttttcaaactgctcatttaaatcttcttctgttataggaatctccataacatcaaagattatttttacattttcatatgagattttttctttattgttttctattctacttagatgtccctgtgaaatacctgtttcatgtttaatatattttagggttaaaccttcttgttgtctatttaatttaataattccgccaaaattttcaatcattgtaaaagacctttcttaaaaaaataaataatattcttttcatacatttcccacctaactatatttattgtatcaaatatagtttttaatgcaacgcgaatatttgcacaaattttgaatcataatttgtatttaaaaaataaaaacaggtctgacctgttttaatattttatctattcttaaagaagtaaataacagctatagctgctataacaagaatacaaagtttagcaatgtttccaactaaagttgctaatgtatctgcactcattgtatccctcctactcttttaaaacaaaagtcatgaaaaaggtacccccttatcatgactttatatgaatgatttcccctcattctttatcattacagtcattataacaaatacttgtggaaaaattatgaacatgacaaggtttattgtcaattatcttgattttgtgttatgattatctcatatacgaaaggactgatttgaatgaaaaagaaaacattagctacggctgctattttgtctggtattttaattggttttgctagtgtaacagcaattgatcttgcatgtaagaaaagacctcctaaaaataaggataaagatcctttagatgatgagaatctttcttggttagatattcaagattttgaagatttagagattacttctcaagatggtcttaaattaaaagcaaaattattaaaggctcctcgtgatacgaataaagtcttgattgcagttcatgggtatcgttcttataatttaaaagaatatgcttattatattaagttctatcatgatttaggttttaatatattgttacctgataatcgtgctcatggtgagagtgaaggaacttatattggttttggttggttagatagattggattgtattcaatggatttataagatgaaggaatattttaataaggatttacaaattgtacttcatggtatttcaatgggtagtgctactgttttaatggcgagtggtgaagaacttcctagtgatgtgaagtgtattatttctgattgtggatttacaagtgttcttgaagaatttgaacatgaattaaaacttgctcatattcctcctgcactaattcttccaacagctacactacttagtaaaaaacgtgtaggttatagctttaaagaagcttctactattgatcaagttaaaaagtcaaaaactcctactttatttattcatggagatcaagatgattttgttccaacttacatggtttatgatctttataatgcttgtggtgccgataaagatttattgattgttgaaggagcaggtcatgctcaaagttatcttgtcgcacaagaactatgtgaaaaaacaattattgattttatgaatcaatatattaaagaataaaaaaaactatgattttcatagttttttattcttttaccatattaactacactacgtaccattgctccagtggcagctgttccatcattatcagcagtaccagcaatgtctaagtgaatccattttgttccttcttctacaaaagcttctaagaagttagcagcaacacttgctccagcacctgctttaccaactgaatttttaaaatctgcactatgtgatttaagttttgcaaaatattcttcatcgattggtaaacgccaacctttttcatcactttctttcatagccttatcaaattcttgataatattcatcatcattagagaatactcctgtataaatatcacctaatgctgaaacacatgctcctgttaaagtagctaaatcaatgagttgtgtagctcctaattgttgagcatatgtaattgcatcacatagaataagtcttccttcagcatctgtactaataatttctactgtttttcctgataatgttgtaataacatcttgtggtttataagcttttccactgactaagttttctgttgttggaataatgccatatacattagctttagcttttaatgcacctaaagttttcataactcctaatacatctgcaccaccacacatatcatatttcataccaagactatttccttttaaattatatccacctgaatcaaatgttaatccttttcctattacagctgtatatggagtatctgcatttgtatattttaaacaaatcatataagctggtatatgactacctaagtttactgataaaatacctccagctttcatttcttctaaagcttttttatctaagattgtacattccattccatactcatctgctaatgcttttgcttcttcaactaaatgaacaggtgtcattagattagatggtgtatcagctaatcttctagcatagttgattccttctccataagctattgcttcatctatatctttttgtatatcttcatcactaatcatttgtacatcaacaatatttttgaagtcatgtccaataacatgttcttgatattgtgaaatcatatgactttcaataaataatcttgtgatttgatggatatttatttcatctgtacatgcttgtttaactataaagttcattggttcttttatttttttagatactgtttcaaatgcttttcttagtttcattgttgtgatttcttttgaatcacctaatccaataaaaagaatagatggaaatggtaattttcctaatgtatgtatttgtgttatttgattatattctttattaacaattgtatttaaatcaaaacctaatttctcaattatttcattacaaatatcttgatctttataaattggataaattctactttccttatattcatttaattcactatattttatctgtttcatctttctttcctccatttatatatatcctatcacttttttaacaagataaaaatagaaaaatggtacttatccatttttctcataaacgacttttccatctttaattgtctttataatttcaatatctttaatatgttttttatctaccttcaaaggattatcacttaaaataatcatatctgcctttttaccaactgataagcttcctttatctttttcttcatgatattgataagctgcatgaactgttaatgcttttaatgcttcaattggttcaatacattcttcttttcctaaggtttctccattgattgtttgtcgattaacagctatttgaattgtttctaacatatttggttctattactggtgcatcttgatgcattgtaaatggtaaatgatattttaatgctgaatgaaggggactaattgtttgtgctctttcttttcctaattgtcttaaatgaatatctccaaaataataaacatgtgctaggaaaaatgaaggaatcatttttagttctttaattctttgcatttgtgattctctcatcatttgagcatgtataataactggtctaatatcttgtgaacatacttgactatattgattgatataatgttcaatggcttgatcaccattacaatgtgctaaaacttgcatatcctctttgattgcttgttggagattattttttatttgttcatcatttaatgttggatatccatatgtaccatctacataaggatcaattgtccatgctgttttattttgtggtgaaccatctaaaaacattttatatccacctattttaaaatgatgatgatattgttttttataatctttaaagacttctttaaattgaacagcatcaaatcctaaatatcctacaacatctaagaaaaaatcatctgtatcaactaacatttgataaatatcttttaattcatcgacaatcattccatcttgaatcgttgttattccatagcttgcatatttttcctgtgcttttgtataagcctcttttaactcatctaatgatttcattggaatcttttggacataagaagtataagcattttcttctaaaaaaccagacatataattaatttttccacctactggtgaaattgtcttttcattaatatttaatgcttgtaatgctggtgtattcataactccacaatgtcctgtataatgttgtatacaaataggtattgttgatgaaacagcatctaattcttgttttgttatatgtcttttttcttttaaattttcttgattatatcctttacaattaataaattgatttgcttttattttatttgcttttatatattctaaaatacatttttgaatatcttcaatagtttgacaatcatctaatgcaacttgtaataatcccattgcatatccacttaaatgactatgtgcatctataaatgatggcattaaagtatgtccttttaaatcaataaccaacatatcttcttgatataaatcatcatattcaccaacacttataattcttccattttcttctactaatacattcccttgattttcatccattgttatgattgttccatttgtatatattgttttcataatattgcctccacaaacttattatcttcctcatttatgaatgcaatattaaaataaccaatcaaacaacaaagactttgtctttatatcttttgtagattcacaataattgactttcaattctccttcaagggtttttccttttcccttcccaatgactattttatagactccttgtttaaaactagcttgataatctttttgatgatcagctaaaacttgatccttattatcaactcctttaacccattctttataatcttctaataaattattttttatatcatacattttttgaatatcactttcttgattagaatttgctattattttatattttggttcatggcttttggcttgaacacttacacataacattcctgctaatataacaaaaataatttttttcattgatttcacctcattagtgattatgaacataattggtaaaaatatacaaaattactctataaaaaaagaaaaaatcaattttcttgcgtatatatataataggagggtttatttttggaataaaatacgaaaatatttacaaattgcaaattttttgatatattatttttagaagaaatatcacaattttgtaagtgtttttgggaaagtgaggtgataatatggagcaaggtttgatggaaaccaaaagtaaataccaatgggctattcaaagttttactcttatggatgatactttcatgcgtattatttttaaagattatcaatgtttacaacttcttttagatattatctttcaaaaacaccttcatattatttcttggcatactcagtatgatttaaaaaatttatatggacgttctttaattgctgatattgttattgaagtagaaggtagaaagtttattaatattgaagtacaaagaagtagagatggtgctcatcctaaaagactagagttacataaaagtcttatgatggcaaatacaacatatcctcaagataaatgggctgatatacctgatataagcattgtatttatatgtgaagatgatattcttaatgaaggtaaacctatttattatatgcatacaacatatgatgaaaatggtaagtttgttgataatggtgttgaaagtatttatgttaatggaaaaataagagatgaaacacctttaggtagattaatgcatgatttcttttgtacaagagcagaagatatgtattatgcagtgttgagagaaagggttaattattttaagaatgaggaaggagctgaaactatgtgtgcaattatggatgctattaaagaagaaggaattagaaagggtaaaatggaaggtatagaagaaggtagaattgaaggagaaagaataggtattatgaaaatgattagaaatctttcatttgaagaaggtattccttttattgaagcaatgatgaaattacatattcctcttaatgaacaggaatcatatatgaaacttctggtttcataaaagataattacactaaaaataatcctcctaaacaaaataagcaggaattaaaacgtaggcgttattaaagaagaatcctatttaaagctactttaacaaaaaaacgtagatacatatttcatgtatttacgttttcatttttattcataatcttcatttgtatcataatatgttagatcatcaaatgtttgtctcctaataacaagtttagactttccttgataagtaaacacaacagcaggttttggtaattgattataattagaagccattgaataatgatatgccccagtagagaattgagcaaaaatatcacctggttcaggttttgctaccataacttctttaacaacaatatctcctgattcacatattttccctgcaactgttacttttgtatcttttggttgttcagctttatttacaatgacaccttcataatcagcatcatataaacatgttctgatattatcagtcattccaccatcaatacttacatatgtacgaacatctggaatttctttaattgccccaattgtataaagtgtaatccctgcattaccaacaacataacgtccaggttctactaaaaccattggcatatcccaaccacgtttatcataaccttctttaattgttttcataatctctgttgtaatgacttcaaaatctaatggttcatcttttttagtataagctataccatatccaccaccagcattaatttttgtaaccataacacctaattgatcataaatttcataagcaaatccaacaaatcttttcattgcactaatataagcatataaatcaaaaacctgtgaacctatatggcaatgaataccttcaaactcaatatgagtagactctaaaatttttgaaattgcctctaaataaataccatgtctcgcactaaatccaaactttgtatctttatgaccagtttgaataaaaccatgacccccagctttaatttcaggtactactctcactgtcgcatatattgtcttatctaatcgactagcaatttcttctactaattctatttcataaaaattatcaattacaaaatgatctacatcatgtgatattgcatattctatttctgatggtaatttattattaccgtggaaataaatcttatgtggatcaaatccagcttttaaagctattgagatttcaccagcactgacacaatcaattcctattccatattcattagctaatctatagatttctaaacaactaaatgatttagaagcaaataatggtaaaacattttcgtatttatctaagaattttgtttttaattcattcatttgatgacgaatatgtccttcactcataacataaagtggagtcccatattttttaactaaatccatagcattgacatcatctatatataaagtattgtctctaatttgagcaaattctgtttgtaaaaccatccctaatcccctttagtataaattttttaaagtaaacaatccattttctttatctacaattgcattacaagctgagatagctccttgtacaaaaacatctttagataaagccgtatgtttaacctcgataatttcatcatgtcctgcaaacaatacagtatgttcaccaaaaattgttccagcacgtactgattgaataccaacttcatttttttcacgtttatgatgaacttgactacgatcataaacttcttttgtttcatcaatatcttcatgaataacatcatataaaagtttagctgttcctgaaggtgcatctattttttgattatgatgcttttcaataatctcaatatcatatccttgttcataaaactcttttgcaacacttttaacaatctttgttaacatagaaacaccaaatgatgtgttatatgattgaaagattggaatttgtgaagaagcttcttctatatgtaatttttgttgatcattaaatccagttgttgcaataaccaaagcacaatgattcttaataccaaactttaaaatatcttctaaattattaggatgagaaaaatcaataatagcatctaccttttcattaacttcttctaaagatgaatacatattttcgtcaattttctcatcaaagacaggagaaacaacaccaacaagatccatcttctcattatctctcactgcttgggcaacctttttacccattaatccataaccatatacaataacattcatattaataacccttttcttcaaattttgccatagcatcaaataataatttcttattagcttcagttgttggaataagtggtctccttaccatttctccacatactcctagtttagctaaagcaacttttggcataattggattcacatcaacaaataaatacttacttacatcattaaagtcataagccattgctcttgcaagttccatatctccttttaatacagcttgagcaaatttttctgtttctcttggataaacattagataatacagaaatgacaccttttcctcccgcagcaataaatggcaagatattatcatcacatccactatacatatcaaaatctaaatctcttgtttttgttaaaacatccatagcataagcaatattatcagtagcatctttcattgctttaatattcttatgttttgcaagttctacaactgtatcaactgcaatattcattccagtacgtcctggtacattatataaaatcattggaatatcaactctatcagcaatataagtataatgttcaattaaccctctttgacttgttttgttgtaatatggagtaacaactaaaattgcatcagctcctacttctttagcaaactttgctttctttaaagctgtttcagtatcattagaaccagcccctgcaatcactttaactccagttcctttagccatttccataactatctttgttaattcaaattcttcttcaattgtaattgttggtgtttcacctgttgttccatttaccaataaagcttgtacaccaccatcaatcattctttgaacttgtcttttaaatccttcaaaatctaaacttccatcatcattcattggtaatacaagtgctacagcacttccctcaaaaattggttccataatatcctccttataattgataagctttttttatttcattaactgctaattccataaattcactaggaataacacaagaaatagaaatttctgatgttgtaatttgtaaaagtggaacttgatattttcctaagatttcaaaaatatgagcagctacccctatttcatccttcatcttttctccttctaccataaccttagcaacattgcgactttgataaaccataattcttggatgcttttgtttaatgttttcaatagcttcattaagtttttcttgatccttttgatcacatgtaaaatcaattctcatctcatcttctaacatgacttgtgaaatcatatcaatattaacaccattcttagaaatttcttgaaaaatgctaccgacaaataatgaattcttttcaacatttaataattttacttgaataatctgatcattatactcaacttgagtaattgcatttttatccatcttcctgccttctttctattaaaaaaattgcaatgataccattgcaatcaataaacaaatatatgaacgcaatagcaccccactttaatctcttaaagtgacagtggcatagatattctctatacccccaggaaatcataacatgcaaattataactccttcggcaattgcccctctttctttttagttgcatctattcataaaagaattcttgactcttgcgcctctatcttgacttaatactatcacaacccttatctgaaagcaacctttatttttatgcacaatcattgcttttatgatatactaaagaacaagaaatgaggtttggttatgaaattattttttattcttatgtttctctttattattatagcaccttttatctattttcagcattattttcactctataaataagctcaccaaaatgattttttcattcttatcacttttaactcttttcgttaccttaataaagatttattttcatcctaattcaccatttttctttatattaaccctaatattacaatattatatgttatcactctttgtcagtatgattttacttattatctatcaattcatctgtagatgtttgcataaacaagtcattcaaaaaatatctattattcttatagttatatctataagttttgtatctattggatatattactcattttcataaagttaaagaaccttatcagataactattcataaacaatcttcacttgattatttacatattgcgtttgtaagtgatatgcatctaggttctggaacctatttaaatgatgtaaagaattttgttgatgctatgaataaaaatgattatgatcttgtttgttttggtggtgatttatttgatgaaacgactcctaaagaaatgattacagaagctttagcacttttatcacaaatagatagtcgttatggaatgtatgccgtgaatggtaatcatgaacactatgctcagtttcttgatcagcaagcttacaaaaaaaataatattcatcttttaagtgaaaactatgtatgtgttaatggtctttttaatatagtaggtagagaagatgttagtgctaaaagtcatataacttatcaacaagtcattcaaaacatggatacctcattacctactattgttttagatcataatccaaaacgttatcaagaagttatgagtgaatcagatttacaattatctggacatactcatgctggacaggcatttccattatcattagcaactgctcctttatatgataatgattatggattactcttaaaaaacaacttttctttgattgtaacaagtggatatgggtcatggggatttccggttagattcatgacacaatgtgaatttgttgatatcatggtaacattttcaaaaaagtgatttttgttatggacaaatactaacaaataatatatcatatgaaaagcgaggtaaggtagtatggttatagaattagatagtcaatatgaaaatagaaaagaagttattgaagatattgtaaactcttttattaatgaacattctattagcgtgtctcaaacagcttttgataatttaattattcatttatcgttatgtgtatctagagaacttcatggaacttatattcctacaagtgaaagtcaaattaatcatttaaaagaacatgagtactatggaatctctaaagaaattgtcaaagcgttaaataacaaattcaatattacaattgatgaaaatcaaataagctatgtgactatgtatttagcaaatattaacttattagatatcgattttaattgtgaattcgatttatgtgatgatgaaatggaagaaattattaatgaaactattgaacgcattcaaaatcaattaaaaattgatttaaaagaaaataatgaattctatacaggaattacattacatttttatcctgcattagatcgtttacaaaacaatcaacaattaacaaacaatccactcaaggatcaagtgcaatcacaacatgaaactgaatttaaatgtgctgaaatctttaactctgttgttgaagaacattaccacaaatcatttaatgaacatgaattagcatatattgctttacattttggtactgcactcaaaaaataaaggaactttcaaaaagttccttttttaattttgaacatcaatatctatataatattcatcctgatttaaatcaatatctttttgataaactttcaaatctttttttaatcctaaattatcatcttttagactatatggttcttgtaatattagtttaatcttttgtgaagttatatttaatgatgattgatattgtgtcatataattaaaattatgatcttgttttgattttaaagcaacataataattctgtaaatattgataatttaacttaatagatgaatcagccggaattttgacttcatgactgatttgataatatgcatcatctataatgtattctatagaaaacatttcaattggaacattattttctatcatttcatcaatgagatgatagaaattttgattgatagaatcttgattaatttgatactgtttctcttttaagaagatattattttgttctaataatattgcatcaatagccttcttaactgttattttttcttcatctatcttagcttttacctcatgactaaccttatttaaattactatcactatatccagttaaatgaatatcttttattttttcttttgatatcaacataggtgttaatgcatattctccattatccatcataatttcaaatatttcatcttcattcttatctatgttgtaacagtaaattttttgatttttgggaatatcaactgttaaataacaaacagttccatcttgtgggtattgtctatctacaaaacgatagacatagacttcttgttttaataagtctttcatttgttgggatagttttttaggttggttatctaataactgtttgatttgattgatattatggggtaatgttctttcaaataattgattttctttagaatattgatattgattaataaattgttgtaagttgatttgataatcaattgattttccattcgcttcaatcatgaattcatctttatttgataaatatcctaaataaggatatttcagttgaattgttttttcttgttgactatgattatataattcatattcttcttttattagaaaattatttgaaatatttatttctgtatttctagtagcagtgatatcttgtggatggtcaatttgtaaaggcataatggcaccattataataaatattataaccttcatattttgaaccataggtatatatgtccataataattacacataaaattgtcactatagctaaaccaataagaaatgtatttcttaataaatgtctttctttcataattattgcctcctttcataaaagaaaaatgagattatctatctaatctcattatatcagcaattatttgtttttcaaaactttatatagtgcatacaaaataatacattcaaataaacaagaaagcataactatcataaatatataacttataatagaaagaacattattccctctattgaatgctgtaacacctaagaaaataactaaactgactaaaccaattgttcttaaatatttaaaaaacttatagaatctttctgataaaacagtatattttcccatcttatttacctatacaaaagcgtttgaataattcatctaataaatcttcttttgctctttctcctaatatttcttttaagttttcccaactatcatataaatcagtcacaatcaaatcagttggtacctgatttttcattgctacaatcgcattatccaatgactcacttgctctttgtaataattgaatctgtcttgcattagctaaaatatcttcttgtccagcagtaatttgtcctaactcaaatcttttcttaatctcttgaatcaaagcatcaatatcattatctctagcactaatagaaataccctctatatcaatattatgtccttgatcttttttattcacaacaataattctttgggtatctttagataactctaataattcttcatcttctttacttaatggtgctgaaccatcaataactaataaaaccaaatcagctttatgaataagttcttttgatttatgaacaccaatattttcaacaatatcatcagtatctctaattcctgctgtatcaatcatatttaaaataatattatccaaacgaattgttccttctacaatatctcttgttgttccagcaatatcagttacaattgctttatcttcatttaacaaggcatttaataaacttgattttccaacgtttggctttcctataataacagttgaaataccatcttttaatagatgaacatttttagatgattcaataatatgattcatctttttttgtaaagattgactttttggtaataaagaatcagcagttaattcttctacatcttcatattcaggataatcaatattcacttctatttgagtgataatttgaattaaatcttctcttaaatcttcaataaaatgactaatatttccttgaataccttttaacgctaattctgtagcataatcatttttagcagtaatcaaatcactaatagcttcagcttgagataaatcaatacgtccatttaaaaaagcacgctttgaaaactcaccatgttcagccattctagcaccttttttcaaacaaagattcaagactttttgagtaatgtaaacacccccgtgacaattaatttccaccatttcttcaccagaaaaagttcgcttaccacgataaatattaactaagacttcatcaatcttttgctcaccatctttaatatatccataagtaattgtatgacttgctttatttaaaatcttaccagtaaaaaactcttgaacaaaagcaatacaatctttaccacttaatcgaataatagatattgctgcttctaatcgagaagttgcaatcgcaacaataatatcatcattcatcttttttcacttcctttatgttattcttatatagtataacaatatccatctaaaatatctatgatttcaaagaaaaatctcagttataaactgagatttaacaataagcagctaaatacatttgtggattatctttatatttttcagcctcttgttgacttagaaaaactgtataatgaatttgatttgaataaatcacatgtggaccttcacatcccgaatatccttctatactaaaagtatattctttttcatttccttccacattcataacttgacctgacataacataaccattcattaaaaagtataccattgttccttcttttaacatatatttaccctctttcataaagattagctgcaacataaacaatatcttctaataatttctgcatttttataataattggatgttctgataatccataatgctcggccattttcactgttttttcaaatgctaaccatgtacaaccattttcatcttcccaaacagctatttttaatggtaatgcaagagcaatactttgatcttctatcatgagattagttcctacttgaggtgaaccaaataccaagactgttgttggtcttaattgcatatgaacttgttttgcatttttagcatgatcaaattttgcaaaaagtgggatttctcttttttgtaattcttgttctaatcgtttgacagtttcttcaactgaaaattgtccttccatcaaatacaactgattatcatcataatttgttgataataaatcaccaaatgctgctgcaatttttcttcctaaattcgtaaaatcaatattttctttattggctaataaagtcacacaaaccaattcttgtggatcagtgaaacgacttaagaaagatgaataaccttcaatacttcctttaatatccattaaaccacgatgtttatagaattgccatccagcaacaccaggaacttccttaccatttggtaaatgccaagccttataaactttttgacgattttctaattcatggattaaaattccaccagctaaaccaatatcccaaaatgaaatatcttgagcactcgcccatatatcatgatatccccttaatgaagttattttttgaatatcaatttcttctccatctttattataactttttgctatttctgttggatctacataatttccatcttttttaaagagttgatgtacaaattctgttttagaaatatcttcatgataaaattgatttaaatcttcatagaaacctgtatgttttaaatttaaataataaatttgtctatccataacaaaatcatgataactttgatgactgactctttcaacgatttcacttaataataagaaattagttgcaactttttcaactgcttctcctggctgaaaatgtaaaggttcagcctttaacaaatcaataattgctttaaactccatactttcatgataatcaggtaaaccacttgcatgatgtaataaatctattactttaatagcttcccatgactcaggtatatcatcaatatattttttaattgattcatttaaatctaataaaccatcttcaaataactgcataattgcgactgcgcaaaaggcttgtgaaatatctccgacaggccacattgtattaacacttgctagtcttttttctttcacatcacttagtccatatcctacaactctaggaatataaggggcttgtacaatagccaatgttaagcctggtatatcttgttctttcataaaatcaataatcatttgatcaatactataacctaaataacttacatccttattacctcttaatttcatttcactgtgttctcttgtgttcatattattttccttcctcatagatattttctaacttcattaaaatatctttgattgttaaagtcgctaaataactttgacatgatttttctaaatcatcgcataaatcatcaacaacatgagacattccactacttaccatacaatctttattcatatcaccactacgccatgaagtttgacatatctttatatgtattgcatcgtatacttcttttaatgtgattttctcacttccaatttcagcataatatccaccattaaccccaacttttgtttttacaattcctgctttttttaaccacgataatacttttctaattctaacaggattaacacagacattatcagctaattcttcacttgataattgcttattttctttccttaaataaaccaaaacatgaatagctataataaattcacttggcatccttctcacctctaaactgtaactttttttattacaatttgattatatatcattttttataaatatcaaattatatgcttgaaaaataaaaaaccctatcactagggtttaatctacatatgaaattgtaatatatctattttttccttcgcctttactttctgtttttaaatgattcatttgtgaaataacttgatgaatcacttttctttcatcagcaggtaaaggatcaagtttaacatcagcttttgtctttaaaacttgtttaccaagtcttttagccatagatgatactttcttatatctgttttctttatatccattaatatctaaactaatttcaattcttttcttaaattgagtttgaatagcatttttagcaataaaattaaatgctcttaaaatcacaccattctttccaattaagatagaattattatcagtattaatattacaataaatacgtccatcttgaatataagatactgtttcaacagtaaattgcatatttgtaagtgttcttctcacaaaatcttctaaatactcttgtaccatattttgtgtgtaacattcaataacgacttttttagagaatagacctctcttttcttcaataacttcataagtaagttgatctaaagtcacacctaaatcaagacatgcattttgaacaacttcttcttcagtttttccctcatatgttttcatatatttttccgtccttatttatctcttttcttttcaatatggtaaatttgaatataaactgttctaatgacagtaattaaacttgtagtaatccaatataatgacatcgcagttggcattgataaagcaaaccatacgatcattgctgtcataacaatattcattgttttcattgattgttgttgttttgaaaccttataacgaggatttctctttaacatgatattgttaatttcaatagcaaaatattgtgtaatacctactactgcaacaataacaatatatacccaattaccacttgtaatttgtgacattggtgtagcacctaagtttaatccaaataaagtagaagtatataaaatttcaattctttgaacagcttgccacattgctaacataattggcaatgttaagaaagttgaaaatgaactaaacatactgatattgtgctttttatataaagcttgaatttcagcagattgtctcatttgtgaagcttgatcttttcttccagcatattttctttggattttttccatttctggttgaattaattgcatcttttgagtagattcagttgatttgatcataattggtaagattaagagattgataaaagttgtcataccaacaactccccaagctacattaccaaatacatcacttataaataagataccttttgcaattggaattgttaagataaaatcaaagaatccagcttttaaactccaaggtgttgctgcattaattgcacgtgatgctaataagtttccttttgaatctaagttctgaccacaacctgtcaagacaaagacaaaggcaactaaagcaaacacctttaaaaacttcttcgtacgttgatctaaatacatttttacttttccatccttttatttattttgtcatagagatactttaaatcttttagattttcttgatatgaactctttaagaatttttgtctcactatcacaataaaatccattttttgatctttatcaaaaacctcttgaatcatcattctgacttgtcttttcgttttatttctaacaacagcatgacctaactttttactaacggagattcccactctcatatgttcatcattaggcaaataataaatgacaaatttatgatttgctactgattttttcttatgaataatggtttgaaaatcttcatttttcttaattcgatataattttttcatatttttttagaaaaaaaaccacattaaagtggaatttttttgttaggcagataaaacttttcttcctcttttacggcgacgagcaagtacttttcttccgcctactgttgccattctagctctaaaaccatgagtttttgatctttttctcttatttggttgatatgttcttttcattgattacacctccaaaatttctatatttttttatacacagtaacatatgctccattattatatggtttttgcccatataagtcaatgaaaatatctaaaattctttatactaaccccttgattttgttcataaaacaagcatttttctagctgttatttgctagtggcaagatataaaaagatattcactattattgtgcttatttattattattttacatttctttacacagaacttctttatcttccatattttttgcacaacttagcaacgttgtgaaagtctttattcacaactgtgcaaaaccacccaaaatctatgatatatctacattttttatgtgcataataacatgcatatgttgtgaatctagttatgcataaaaataaattcacatttattcacatagcataactttttatgcacaattccccatctatgaaatttgtgtataatcaaaaaaagctccattaatcaacactttttaatgtgcgtaactatgtgcacaacctgtgaatgggttttttctgcttcattttatgcacaatttcctctataatatgatgtgagagaaggtgaatatgtgaataatcttgatatagactggcaaaaaacattaaatctctttaaaaatagattagatgaatttggaattgataagattacttttgattctttcttcacaactctacaaattagagatattgtggcaagtgatgtcactgtaacaattgatactcaatggagtttagatgttgttttgccttatatagatcgtttagaagaaatttataacactttaacaagtggtcattaccatttatccctagtcacagagggagattataataagtctgttttacaaaagaatagtttattaaactttgaagataatttgaatcctgatttaacatttgaaaactttgttgttggtaatagtaaccggattgctcaaaatgcctctttagccgtcgcaatgaaacctggtatttcttatagtccattatttattcacagtaattctggactaggaaaaacccatttattgaacgctataggaaattatgcaaaacaccgtgatccagcgactaaagttttattcacaacaagtgaaaactttgttaatgaatatattcaatccttatctaatcatactattgatgaatttaactataaatatcgccatattgatatcctattaatagatgatattcaatttatggctacaaaagaatcatctagtgaaatattctttaatatttttaacagtcttattagtaataaaaaacaaattgtcattacatcagataaaccacctcgtgatttacgaggaatggaaagtcgtttggtaagtcgtttctcatctggtttaactgtaagtattgataccccagagtttgagacatctaaagctatcttaagaaagaaaattgaagttgaaaatgttgactatccaatttctgaagatgtctttgattttattgcgacacatttcaatactgatgttagagaactggaaggaagcttgaaacgtttgttgttttataagcttatttgtgggaaaaagcttgattgtatcgacttaaattttgctttagaagcatttagtgatacttacacccaacctgctcaaaagaaagaattaactgtatcaaatataaaaaaatgtgttgctgactattataacctaactgttacgcagattaactcgaaatcgcgtacatctagtattattgttgctagacatattgcaatgtatttagtaagagatttaattgatgatatttcttttattcaaattggtcatgaatttggtgggagagatcattctactgtcatgaaagcctgtagtaaagttcaaaaaaagctagaaaaagatatgaactatcgtcaagctattgatgatattaaaaagaaacttgtgtaaaacttgtgcacatctatccacaatttgttcacacgttatttttaaaaaaatattgataaatacacaatatttatgagttattcatattgtgcacagtattattattatgatattatttaaataataataaatataaaggagaaaaaagatgaattttaaaataaaaagattagaattactaaatgctttagctaaagtatctagagctgtttctatgaaaagtcctttacctgttttaacaggaattaaatttgatttaaaagaagatgaattaattttaactggtagtgatagtgatattactattcaaacaagtattcatgagaatattgaaattattgaaaaaggttctgttgttttatcttctcgttatatattagaaattattaaaaagattgattctgaagatgttcatatttatattgttgatggaacattaacaagaattgaaggagcaagttctcgttttgatttaaatggtacatcttatattgattatcctagaattgatttaaataaatctggggttaatttacagatgaaagctactgatttaaaagaagctattgaacaaacatcatttgcaacaagtgaaaaagaaacaagacctgttttaactggggttaactttaaagctaaggatcatgtcttagaatgtattgcaactgatagttatcgtttagctaaacgtattttaaatattgattctgatgtatcttttaatattattattcctaagaaaagcttgattgagattagtcgtattattgaaaaagatgaattgattgatttatatgtatctgatcgtaaagttttatttatctttgattctgtattgattcaaacaagattaattgatggttcttatcctgatacaagtcgtttaattcctaatgattttgattattctatgacaatagatagtacaagtttattaaattctattgatagagcatctttattatcaaatgaacaaacaaatattattaaattatcaatgaatgaagatcaagtcatgttatcttcttattctcaagaaatcggttcagtagaagaaaacttatcaagagctttctataaaggtcaacctttaaatatttcatttagtgcaaaatatttaaatgacgctattaagagtattaatggtgataaagtaagagtattattcactggtgaaatgaaaccatttattatcaaagactttgaaaaagaagatattattcaattggttttaccagtaagaacatattaataaaggagtctcttttaaaaaaggagactttttttatttaccaatagtcatccgcttgaataagatatttgctgtgatataattgagatagaatatataggcaaaactatcgaaaggtagtgacgcaaagctatagggcctgaaatggcagccagttgcatcaatgaaacaggtgcaaacctgtttatttttttaagagaggtttaatttaatgaagaagttattaaaaacattgattattattggttctatttttatgttgattttttcattctatgattttttatcaattatcaacaaattaaatactagaaatactcgggaacatttatctgatgtcggtaaacaaaccgcaaatacttatagtgaaatatttcaaagtttaaaggtttctattgtgaatacgagtgaattgattagtacaagttttgaatcacaaaaagatattggaaatattttagagaatttttgccataacaagaatttatttgctagagtgtggtatgttgatgaaaatcatttattacaaaattattatcataaaatgacataccgttcaaagaatgattatattgataaaatctttaaaggcgaagcagggattacgaattcttttatttctgattataatcatgatgaagtgattgctatttacgcaccagtttataaaaagaataaggtggtaggtggagttgttgggattttagatttgaatagtgaaaataataattatatttatcaggatgtttttgataatcaatcatatgtttttgcggttactggtgatggacaaattatttctaagattaaaaatacacatactttatataatggagataattattttgagtttttagaaaaagaagttcattttgatcaaggaagttatcatggaatattagaaatgattgataaagaaaaatctggttatttttctttttcttatcaaaagaataaaagatatgtatatatgactccagtaaagattaataattggtatatctttacagttatctcaaataaagttattgatcaacaaaataattatattaatcaagcaacatctttattaattattaaaatatctatattctttttgattatgctattttttattgtaagatattttcaaaagattaattctcgttatgaaacaattaataaagaattaaagacaagtaataaaaagattgcgttacttttaaaacaaaatagtgatcgtatatttgaatataatatcaaaaatgatagtttaactttagatgcttggaatgattatcctaaattattattaaatagttttcttagtaatttgcataattataattttgtttcaaaagaacatgaacaacttttaaaagattcttttcataaaattattgagactcatcaaaaagttatctttgatgcaaagttcccttatattagtaaagatgatgagacttggtttcatgtttctataatatataatgaagataatgagaaattaattggaactttaagaaatagtagtagggaaatgaaagagtataatgttcttgtacaagatcatatgtttaaaaattctatttattcacaggcttttgcgatgtttgctgtgaatttaaaaacacgtaaagtggttatttatcaaacgggtggtatttattataatgctattgatgtggaatataatgatgaatttattaataagcttttaaaaaatacatataaaaaagatcgtgataaagtgagaatgttctttaattataaaagagttcaaaatttatatcatcatcatgatggacatgatcggattgaatttcgtatttttaatgaacagacaaatgattatatgtggattcgttttaggattcaatttgaaagacaaagtagtaataatgagttattgatgattgcttatgcaaataatattcattcagagaaattaagacaattagaaaatgagtttaaggctcaaagagatgggttaacagggttgtataatcgtcagacatttaatcaattggttgatgattatttgaaggaagaattttctgttgctcgttatgatgcttatatgattgttgatttggatgatttcaaaagtattaatgatacattaggtcattcttatggggatgaagtgattcaaagagttgcagatatattggaaaataattgttatgaaagtggctatgttgggcgttttggtggtgatgagtttgttattttcttatatgaccaagaatcgaatgctcaaatagaaaataaggttagaaaaatattgagggaaattaatggaattaagtttgataaatattgtgagatatctgcttctataggtatgacatttgtaaaaaaagaaaagtttcatcaggagctttttgaaatgtgtgataaagctttatatgtatgtaagaatagtggaaaaaatagatttttcatttatacagaaaatgaagatattgatgaatagtcagtatctttttttcataatagtttttgacttttagaataaaatattattgaaaattgaaaagatgatatataggttgtaagagtaggcaaaaatgtctactttttcatttttcgtcctcattttcgttttaagagacttttagataaaaatgtgatttatgtcttttttaataaatattgaatataagccataaaacctaccatttttgatgtttttatgctataataggaacagtattggaaagaatcgggtgacgtgtttttatgaaagaaattggaattaatacagaatatattacactaggaaaatttttaaaatatgtgaatgctgtagattcaggagcagtagctaaaatggttattttagatggacttgttcttgttaatggtgaagttgataccagaaggggtaagaagttacgtgagggtgatgttgtctcttttgaaggtattgattatgttataaagtatgaagattaattctattgaattaaagaattttagaaattatcaggattgttctgtagaatttgatccttttattaatatttttattggtaagaatgcacaaggtaaaaccaacttattagaagctatttatatattatcaatgtctaagagttttaagacaaagattgttgatgaattgatttattttgatgaagattttgctaagattcatggtgatattatgactcatgagaagcagatgagtcttgaaattgttttgtcaaagttaggaaagaaagcttttattaatcataatgaaattaaaaaaacgagtgattatgttgggtatttaaatgttgttttgtttattcctgaagatttgatgttaattaaaggaagtcctcgattgagaagaaaactcatagatatggaaatttctaagatttcgcctgtatatatgtataatcttaataaatataataagcttttaaaagaaagaaataagtatttaaagatgttacatgatagtcataaggatgctgatacttatttagaagttttatctgaacagatggctttattacaggttgatttattaaagaaaagaattgagtttgttgatttattgaatgagatttcaacgaagatgtatgattatatagctttacatcaagaaaagttatctttgaaatataagagtcattatcaagaattaacatatgaatgtattttagataaatatcaaaagagttataaaaaggatattttgttaggtcagacaaatcatgggattcataaagatgatttgttgatgtatttggatgaaatggatgcatctatttatgcatcacaggggcaacaaagatcgatagttttggcaatgaagataggtttattagaattgattaaaaaggaaattggggagtatcctattttattgttggatgatgttttaagtgaattggatgatgttagaaaaacaaagttattgaatttaattcaaggtaaagtacagacgtttttaacctctacatcagtagatggtattcatcatcaagttatagatatggctaagaagatagaaattgaaaatggtcagttgaaaggagaagaaaatggaagaaaataaagtagaacacagttatgatgagtccgatattcaggtactagagggattggaagctgttagaaaaagacctggtatgtatattggaacaacttcttctagaggattacatcatcttgtttgggaaattgtagacaactctattgatgaagctttagcaggtttctgtaatgaaattagagttattcttgaaaaagatgatattgtcaaggttgttgataatgggcgtggtatgccaactggtaaacatgcaaagacaggaaagagtacagttgaaacaattttaactgttttacatgctggtggtaaatttggcggtggaggctataaggtctctggtgggcttcatggagttggtgccagtgttgttaatgctttgagtgaatggctagaagtgcatgttcatagagatggacatatttattatcaacgttttgaaaatggtggtaatcctgttagtgatttgaaaatcattggtgattgtgatgatactggtacaactgtcactttcaaggctgatccacttatctttaatgaaacaactgtttatgattatgaaacattgaatcaaagaattagagaacttgcgtttttaaataaaggtttaaaattgattttagaagatcatcgtattgaacctcataagaaaaatgaatatcactatgaaggtggtattaaggaatatgttgcttatttaaatagaaataaaacagcaattcatgaagaaattatttatgtagaagatgaagttgatgatattaaagttgaagttggtatgcaatataacgatggatatcaacctaatatctattctttctgtaataacatcaatacacatgaaggtggaacacatgaagaaggtttccgtttagctttaacaagagttattaataactatgctaagaataataatttcttgaaaaaagatgatgagtctttaagtggtgatgattgtcgtgaagggttaactgctattatttcggttaaacatcctgatcctcaatatgaaggacaaacaaagacaaagttagggaactctgaagttagaaaaattgcaagtagtattatatctgaagctttagataagtttttattagaaaatcctgatactgctgcaacaattatgaataaagctatagtcgcaagccgtgctcggatggctgctaaacgtgcaagagaaatgacacgtcgtaagacagctcttgatagtattgcgttacctggaaaattagccgattgttcatcaaaagatccaagtgaatgtgaagttttcatagtcgaaggggattctgccggtggtagtgctaagatggggagagatagaagaacacaagctatcttgccattaagaggtaaaattttaaatgttgaaaaagcaagattggatagaattttagggaatgctgaaattcgttctatgattacagcttttggtacaggaattggtgaggaatttgatattagtaaattaagatatcataagattgttattatgaccgatgccgatgttgatggtgggcatattcgtattttaatgttaactttcttatatcgtttcttaaaaccattaattgaagaaggttttgtttatgctgctcaacctccactttatttattaagacatggtaaagaggatcattatttgtattcagattatgaattagaaaaaatgaaacaagaattaggacctactgcaaagtattcaattcaacgttataaagggcttggagaaatgaatgccgaacaattatgggatacaactatgaatcctgataatcgtgtattatggcaaattgatttagatgatgctatgcaagctgatgcaatgtttgatatgttgatgggtgaaaaagtagaacctagacgtgaatttatacaagaaaatgctcaagaagcagaacttgatttatagtgaaggagagagataatggaagaacgtggaattaaaaaaagaccgttaacggcggagatgaaacaatcattcattaactatgctatgtcagttattgttcaaagagcattgcctgatgttagagatggtttaaaaccagtacaaagaagaattgtgcatgggatgaatgaattaggatgttatagtgataaaccttataagaaatctgctcgtattgttggggaagttatggggaaataccatcctcatggtgactcatcaatttatgaagcattagttcgtatggctcaagatttctcatatcgttatatgattgttgatggacatggaaactttggttctattgatggtgatggagctgccgcacaacgttatactgaagcgagaatgtctaagatatctatggaattagtcagagatatcaataaagatacagttaactttgttcctaactatgatggtgaagaaagtgaaccagaagttttaccagcaagatttcctaacttattggttaatggaacaactggtattgctgtagggatggcaacaaatattcctccacataatttaggagaagttgttgatgctattcttgcagtttcacataatcctgatattacgattcttgaattgatggaaaattatatacaaggtcctgattttcctacaggtgcttatattttaggaaaatcagctattaaaaaggcttatgaaactggtaatggcttaattatcatgcgtgcaaagacggatattattgatattcaaagtggtaagaaggctattgttgttactgaaattccttatatggttaataaagctagattgattgaaaagatggctgaacatgttaaggaaaaacgtattgaaggtattactgaaattcgtgatgaatctaaccgtgaaggtattcgtattgttattgaacttcgtaaagatgttcaacctgaagttattttaaatcaattatttaaattaactgctttacagacaacttttggggttaattcaattgctttggttaataatgaaccacaaacattgaatttaaaacaaatgattacatattatttagatcatcaagaagaagttattaaaagaagaacggcttttgatttaaagaaagcagaagatcgtgcacatattttagatggtttaaaaagagctttggatcaaattgatgctattattgatttaattcgtacatcaagaacaactgaaatcattcaaaatagattgatggaagaatttgatatgtcagaaagacaagctaaggctattcgtgaaatgcagcttcaaagattggctggtttggaaagagaaaagattgaaaatgaattaaatgatttattagaattgattgctgatttaaaggatattcttgcaaatagagaaagaatacttgaaattattgaaactgaattattacaaatcaaagagaaatttgctgataagcgtagaactgaaattattcagggaacatttgatttagaagatgaagatttaattcctgttgaagatgttattatctcacttacaacaaatggttatattaaacgtactccagttgatacttataagactcaaaatagaggtggtagaggtattaagggtatgagtacaaatgaagatgatattgttgattctttaattaatatgagtactcatgatgatttattattctttactaattttggtaaggtttatcgtattaaaggatataatgttcctgagtttggtagaactgcaaagggattaccagttgttaatttattaaatcttgaaaaagatgaatatgtaaaatcaatgatttctattgatagaaatcatattgatgaagaaaaagaattatatttattctttgttacattaaatggtttagtaaagaaaacatctttagaagaatttaaaaatattcgacaatctggtaagattgctattacattaaaagatgaagatcaattagttgctgttaaattaacaacaaatgatgaagaaattcttattgctgcatctaatggtaaattaattagatttaaagaaaatgatgtaagaccaatgggtagaacagcatcaggtgtaaaaggtattaatgtagatggtggtcatgttgtaggtatgacaacaaatggtgaaggtcaatatatcatggcgattagtgaaaatggttatggtaagatgtcacctattgatgattatcgtgaatctcatcgtggtgggaaaggtgttaagactattaatacgactcctaaaacaggacaacttgttgctttaagagcggttaatggtgatgaagatcttcttattattacaagtgaaggtattgtgattagattacctatggaacaagttaagatggctggtagaaatactcaaggtgttcgtttgattaaggtttcagaaggttctactgtatcaagtgtagaagttgttgaaaaatcaaatgatgatgaggaagaaacaactgaagaatagaaagggattcctagtgaatcctttttctatttgtaaagattaattaatatttttttgtataagggaaaacataaattgacaaatttagcaatctttcatacaattaatctaaagtaggtgagaatatggcaaaagagaaaaagatttatttaaatcaaactgttaaaaacattataattattgttattattgcagttgtattttttctagtaggtaaattatggccaagtggcgaagaaccaacccaaatgacaagtgatttattatcacaacaaatccaagatattagtgaattagcaactgttgagtataattatacaaacatgggtaaatttgaaaatcaagcaactttttatggttggaaagttccttttacaacaaaaagttttattatttcttatgatggtaagattaaagctggagttgatatgactcaagttgaagttaatgttagtaaaaagaagattaaagtaacagtacctaaagctaaaatcttatctcatgaaattgatgaaaagagtattgaagtatttgatgaaacaaaaaatatatttaatcaaattagtattactgattataatcaatttgcaattgatcaaaaagataagatggaaaaaagtgtaaaagaaaaaggattattggaagaagcacagaaaaaagtagaatctactataaaaacttttattaaatctttaaataaatcatcaattgattatgaaattactataaacgtggcagaatagatatatattctgctttttttcttgaaatatttgttgaatatagtataatattagcaatttgggtaaatttttaggaggttatatatgaaatcaagtcaaaatggaaaaaagcttgctattaagatggttattgcgcttgtttgtggtttaattactggttttggttgtattgccttaagagaacatttgttgtcaagtggtcaaactgaattatggacaacaattaataatgtctttttccaagatattactgctgaaggagcaacaagtgctattggtattttctatattgttggtcagttatttgttaatgctttacaattgattattgttccaatggtttttgtttcaattgttttagctatttgtgttgttacagatacaaagaagttaggaagaatttcttctaaaactatcttaactttctttattacaactgtctgtgctttgatttttgctggagttattggttctgttgtttaccatatgggagcatttaatgctgtggatgctacaaatatagcaattaaagaaggaacagttggaacaaatcctttaagtattgttatgtcaattgtaccaaataactttgtttctgctttaacaaacaatggtggtgtattggctattgtattcttagctgtatcggttggattagtgatgaatcaattgaaagaaaaaacaaagacagtgaaaaaattatttattgaattaagtgatattatttctgtatgtttatcatttgttattaataaatttgctccaattgctatcttttgtttattaacaagaacttttgcagcttatggaattgattatttaatgcctgcattagcttatgttgtaactgttgtcattgctttatttgcttatctatttattgcttatcctttatatttaatgattatggctaaattaaatcctaaaccattcatgaagaaaatggcaaaagttgctttatttggtttctcaacttcttctagtgctgctacacttcctttaaataaacaaacgactgttgaagaattaggtgtaagtgatcaaattgcttcatttactttaccattaggaatgacaattaatatggatggtacagctataatgcaagttattgctgctatatttgtagccgcaagttctggatatgatgttacatttacatctatggcagttatagctgtgttggctttgattgcttccattggaacacctgctgctccaggagctggtgctgttatcttgtttactattttaactggaatgggatatacaaatgatgcagcattattatcttattcattaatcttagcaatcaaccgtccaattgaaatgttattaacttcattgaatgttgttggtgatgcttctacttcagttattgttgctaaaaaagaaaatatgttagatgaaaaagtttatcatagttaaaaaattctcaatattgagaatttttattttagaatttctttttttaattcttgatatgtataactttgtgtaacaattctaataactttatcgagttgttctagagtacaattatctaaccattcaaaatcgtcaatatgatagatattagaaataagagtcttcgcatcttctaattttgcttttttaataccaatattaattccttcattttttgcatcatgtattacagtattaatgactctttgatctcgttcatattgataatatgctaataactgatcagagtttaaataatcttcataaagttttacaacttttttatttaaaggacttaattgttcttttttgtgattttcttcattttcaaagagataaataaattgttcaaattgctttttaaaacctacttccatattcaattcctccattctttgtgtttgaataatttcaatacagattggaccttcttcaattttaatacaataatcactatccataaattccaaatgatgtgtgaaatgttcaaaatttttaataggtgttcccgtataaataactaagcatttaacactacttacattataatctcctcctctttttatttctctttccaatagcttagcggcgtaactaataaatcgaatgagaacattccttgttattgtttgattttgcatttctacattatacaaatgtcctaattgatcagtaaaaacgacatctaaaatcattttctttaatttctgattaataggatattcttcagaattttctatatgagtatactcaataggatagtcagatagatgttgagcaataagtgtacgaacatcattacaattttgtaaaagatagtgaaaaaagtaatctgagcaaaatgatataattgatgtattttctttattcataaattttttcctttctagtaaaagtagcccctctactatatatatacaaagaaaaaatctatttttcttttttttagaagaaatttatgaaatattttcatatatattatatattgattacataaaatttacaataagcaaacatttaacaaaatcaaatgaataataaaaaagatgtttgaacttagatagtgttgtggtataatcattgtgttaaatcgatgcgttgactaagtaaatatgaaatcatcaaagagagctgatggatggtgtaaatcagtatgatgacatattgaaatctaccaacaagagaagctaatcacttccggatgatccgttatctcatataaagatatcagatagatatgaaatagggtggcaccacgatatattcgtcccttgtaatggtgtttttattttatcaagaaaaggagaatgaaagatgattgatattgcaaaattaagagaaaatcctgaagcagtgaaagaaaacatgaaaaagaagttccaacatgatcgtttacatttagttgatgaagctgcacaattagataagctttatcgtgaaacactaacaaaagcaagtgaacttcgtgctatgcgtaataaattatcaaaagaaattggacaatttatgcgtgaaggaaaaaaagaattagctgaagctaataagaaaaaagtcagtgaaatggctgaaactttaaaacaattagaagaaaaagaagcagaacttggtcctaaattaaaagaagttatgatgaaaattcctaactttattgatccttctgttccagttggtaaagatgatagtgaaaatgtagaaattcaaaaatatggagaaccagtggtacctgattatgaaattccttatcatgctgatattattgctaagtttaatgggttagataaggatgcaagtggtagaacaagtggtaatggattctattatttaatgggagatattgctcgtttatcttcagctatgatttcttatgctagagattttatgattgataaaggatttacttattgtattccaccatttatgattagaagtgatgttgtgactggtgttatgtcttttgaagaaatggatgcaatgatgtataaaattgaaggagaagatttatatttaatcggtactagtgaacatagtatgattggtaaatttaaagatcaaattgttaaagaagaagatttacctattacaatgacttcttattctccatgttttagaaaagaagttggagctcatggtattgaagaacgtggtatttatcgtgttcatcaatttgaaaaacaagaaatggttgttttatgtaaacctgaagatgctatggaatggtatgataagatgtggtcatatacagtagaattatttagaagcttagatattccagtgagaacacttgaatgttgtagtggtgatttagctgatttaaaagaaaaatcttgtgatgttgaagcatggtctcctcgtcaacaaaaatattttgaagttggatcatgttctactttaggagatgctcaagcaagacgtttaggtattcgtacaaaaggtgaacaaggaacatattatgtagctacacttaataatacagtacttgctagtaccagagcattaatagcatttattgaaaataattataatgaagatggaacaattagtattcctgaagttttacgtccatatatgggtggaaaagataaaatttcttaaaatgagtcgaaagactcatttttttctttaaaaaatctttcgttttatatacacaaaaattacacatatttttcataggttatccataataatttgttaaaatgtgtaagaaaaagaaggaaggggatattttatgaagaatattcttgaatatttagaaaaatcagcacaacaatattttacaaaagttgcatttactgatgaaaatcatgaaatgacttatggaagttgtgtagagtgttctaaaaagataggaacagcattgttagaattaaaagcaaagcgaaaacctatagcagttttaatggataaaaacgtagaaagtttaactggattctttggggttgtttatagtggaaatttttacgttgttattgattgttatatgccaaaagatagaattgaaaaaatatttgaaactttggaaccaattgctttaatttctgattatgcacatcaagaattagcattaagtttacatcataaagtctatttttacgaagatttaatgactactaaaattaatcaggttgcattagatcaagttagaaatcaaatgatagatacagatccactttatgctttatttacatctggttcaacaggtgtacctaaaggcgcagttgtttctcatcgcaatgttataaattatgcttcatggtataaagacacatttgatatcaatgaagaaactcaatttggaagtcaaacaccattttattttagtatgtcagtttctgatgtctttagcactattatctctggagcaacacttcatattttgccgaagaagttattttcatttcctattaaattaatagaatatatgaatgaaaagaaagtgaataccatttattgggttccatctgctttatgtatcattgctaatcttaaagtattagattatttagcattagagtatgtgaataaagtcttatttgctggagaagttatgccaacaaaacaattaaattactggataaagaaaattcctgatgccatgtatgctaatttatttggaccaacagaaacaactgatatatgtacttattatatcgttgatagagaatttaaagatgacgaagttttaccaataggtaaagcttgtaataattgtgatgtctttttattagatgaaaataatcaagaagtgactgatcatagtgaaggagagctttgcgtccgaggttcatttttagctttaggttattataataatgaggaaaagacgaaagaagcatttatgcaaaatcctttgaatcagacatatcctgaaattatatatcgaactggagatttagtgaaatataatgaatttaatgaattgatttatataacacgtaaagattttcaaattaaacatatgggatatcgtattgaattaggagaaatagaggcagccgttaatgcattagaaaaaattcaagcttgtgctgttatttttgatgaaggaaaagataagattgttttgatttatactggtaagatgaatgaccaagagataatggaaggaattaagaataaaattccaagctatatgtatcctaatgtcattattaaaaagaaaatcatgccatataatcaaaatggaaaaattgatagaaaatggttaaagaaccattatgaagattaaggaggaaataagaatggaagaattattagatattttaaaaggattaaaaccaggagttgattttgaaaatgaaaagaatttaattgatgatagaattttagattctttagatgttatgaatttaactgttgaattaaatgatgagtttgatattgaaataacaccactagatatattacctgaaaattttcaatctattgaagcaatgtatgctttaattacacgtttacaagaagattagttatggtttatacatcttatgtctatttagttctatttttaggaatgacatttttgttgtatacaatctttcctaaaaagtataaatggacggttctattagcagcaagttatatttattatatggcagctagtcgtatttggttaattgtctttatattattaacatcattatctgtttatttaggtgctatatggatagataaaattaatgagttatttaccagtgttaaaaaattaatggatagacaacaaaagaaagaatttaaagaaaagatattatggcaaaagaaaatggttattgttttgatgttattgattaatgttggaacattagcattcttaaagtattttaatttctttgctgaggttcttaatattactctattcaatcaattacatatggaaattccaatgttaaaactctttttaccattaggtatttccttctatacattacaagcagttagttatgttattgatgtttatagaggaaaatataaagcagattatcattttggtagagtttctttatatttaactttctttccaacaattgttgaaggtccgattacaagatatgatcaagttgcttatcaattatatgaaggacatgaatttaattacgttaatttaacacaaggatgtcagttaattttatggggtatgtttaaaaagattgtaattgctgatagagctaatatgttagtcaattatgtttttaatgattatatgaaattttcaggattaagtgttgttattgcaattattttttatacaattcaactttatacagagttttcaggagctatggatattgtaagaggtagtgcacaaatctttagtgtagaattaccagaaaactttaaacagccattcttttctaagagtattaatgaattttggcaaaaatggcatatcactttaggagcatggttaagagattatgttttttatagtgtttctttatctggagcttttaagaaatttaatcattttgtaaaaaatcattgtaatgagtatttttctaagttattaccagcaacaacagctttattttttgtttggatttgtaatggactatggcatggggcaagtatgaaatatgtcatgtatggaatgtattattatattttaatggttattggaatgtttatggaacctgtgtttcataaaatattagaagcattgcatattcaaaaagaaaaaacttattttaaattttttcagatattgagaactgttttcattgttaatataggtatgcttatttttagagctgatacattatcagcagcatatcatatgtttatatcttgttttcaaaactttcatttagatttgagtgttattgcacatttaggattaagtgtagcagatgttagtattatattaattggaacacttgttgtttttattatgagtttaattaaagaaaaagggattcatattagagaaagtattagtcaatggcatattgtacctagatggagtttttatttaacaagtttatttgttgttattatatttggtgcttatggtagagggtatgatattgttagctttatctatgcacagttttaggaggtgtaaataatggataaaagcaataatctaaataatcgtttgaaagaaatatttaaaattgttatctttttattgatttgtgttgttttgttaaattgtttatctcctatatttttacctaaaaacaacaataaaagaagtggaattaaatatgaaaatgcaagaggattttatggtgagaaagctcattcaattgaggttttagctattggtaatagtgacttgtatagtgctatgaatcctttgcagttatggaataatcatggaataacttcatatgtttcaggagaaccatcacaaaatatttttagtgcttattatttgttaaaagaagtctataagaatcaaagacctgaagttgttattttagaggtggatgaattgttttctaaaggtgatgctgatgatttggatgaagtaattaataatgtgttaaaatataattttcctttatttgaatatcatagtcgttggaaaagtatgagtcataaagattttaagaatttaaaagttaaatataaggatagaatgatttctaaaggttatatttaccataacaatattcaatcacatccaacaggatataaatatatgaaagaaaatcgttcttctgctttatcagtaacaactcaattatatttagataaatttatgcaattagctagtgatcatcaaacaaaagttctatttgtatggtatccatcagcaactacagcaactttaaaaagacatcaaacaattgaaaaagtcgctaaccgttatcaaattccatttatagattttaatactgatcaatataatacaggctttaattggatgacagatacacgagatggaggtaatcatttaaattatagtggggcaacaaaaatgactaagtatataggacagtatttaaaagacaattatacattaaatgactatcgtcatgacccacattatgaacaatggaataaagattatgaaatgtttatgaaaaagaataaattagcttattgatttgttgatgaaatatgatataatagattttgccattacaataggcggcttcgaaccatgtcaggaccggaaggtagcagcattaagaatgtccgtttatgtgtagtggcttttttcaaaggagaaaaacaatatggatgatgagaaatatatggagttggcatatcagcaggcaatcaaagcaaaagaaatagatgaagttccaattggtgctattattgtaaaagataatgaagttatagctcgagcttttaatcaaaaagaaacattgcatgatgttactgcgcatgcagaaatgttagcgattcgacaagcttgtcagaaattaggaacatggcatctagatgactgtattttatattctacacttgaaccttgtattatgtgtagtggtgcaatcatacaaagtcgtattgataaagttgtttttggtgccgttggtcaacgttggcatggtatttctgaatatcttcagtatcataaatttaatcattatccaactattgtttcaggtatattagaagaaaagtgtagtttattattatcagattattttaaaactaaaagaaatcgttcataaaaagtccataagttgttaatattcattttataaaagatatatataatgtttttaggagatgaatagtatggattatagcgggaatcaacaaaaattatcatatcagcaatttctattaactttattaaaatgggttcttataggtattggattaacaactgtatcatctatttttatggttatgattgttattccatttattatagatggaatatatttatcattattaatcctttcaagtattatagaagtttttatggtttattttttagttaagagattgacacaattatcaaatcaatcagctaaaaagtattattatatatattcaattcttaatggtatttcattatcattatggataaattttactgctcctggagctgttattatagcttttgcattaacatgtgcttattttggtttactttatacaattgtaaaatattcaaaaacaaattttttaacgatgggaaaagtttgtcaagcagctttacctatgttattaattggatatattattttattatttatgaatgttccaatttattatcatattattgtcattcttgatcttattatttttactggattgattctttatgatatgaaaacaatacaaagaatctatgaagaatgtctaccagaagaattagaaagccaagcaatgaagggagcattgttattatatttagatttcattaatgtttttttagatattttaatgcttattgctgataatagttaaaagatatctttagatatctttttattatcgtaaaatatgttataattgagcaaggagttgattatatggcatacaaaacattatatagagtttaccgtccgcaacgttttgaagatgttgcagggcaagaacatattattacaacgcttcgtcacgcagtagaagaaaataaaattgctcatgcatatttattctgtggaccaaggggaactggaaaaacgacaattgctaaattgcttgctaaggctattaactgtactggtgatatcaaaccatgtgatgaatgtgagaattgtaaagaaattaccttaggatcacatcctgatgttattgaaatagatgcagcaagtaataatggtgttgatgaagtcagaagtttaattgaaaaggttaaatatgcaccaactcaaggaaaatataaagtttatattatagatgaggttcatatgatgtctacaggtgcttttaatgcgttattaaaaaccttagaagaaccaccagcacatgttgtttttattttagcaacaactgaaccacacaaaatacttccaactattatttcaagatgtcaaagatttgattttactaaattgagtatgttggatattgttaatcgaatgaagaaggtcattactgaagaacattatcaatgtgatgatgaagctttagaaatgattgctaaattagctgatggtggaatgcgtgatgcattatcaatacttgaacaatgtttagcttttaatgatcaacatttaactattcaagatgttaatcaaatctatggaattgtttcactagaaaataaaattgattttattaaaatattactttctaaagatatgaaaaaatctctttcaatgcttgaagaaatgaaaatgaatgggattgatattaaaagattaactcttgatttagttgatattttaaaggatattgttatttatcgtaataccaaagatgaatctattttatttgttctatcaaaattttatttagacatgattgtgccatatataacttgtgaagaagctttaacatttatagatatattgatggaagctagtgaaaaatattctaaagttattaatctatctatttattttgaattagctattttaaaaatatgtaatcagattaaagatgaaaaagtgattcatgttgaaacagttgctgttccaaaggtagaatctccaatacaggaaatacctaaagttgctgaaattcaagcatctgaaccaattgaagaaccggttgaggaaatacttgcagaagaaataatagatgattctattcaagaggaagttatctctgaaccaatcttagaacaagaggaaattgaacaagaagaaattcctacatttgaatttgaacaaaaagaagaagttcaatcacaagtagatgaaaatattcagatagatccagatgatatcatgaatatattagttcaagctaaacgtgaaatactggaaaatattcaagaaagatggccaattattaagcgttatttagctaatctcaatactgctaaaagtgctggtatgctttgtgatggtgcagcagttgctgcttgtccaggtggattgattatttcatttgaatttcaacctgcagtgaatgctgttaactattataagaattataaacaattaagttcatttttaactgagatattaggacaggaatatcgatttattgctgttcaacaagatgattggttaaaaatacgtagtcattttattgaattaaagaaaaaaggtcaattgccacaaccacatgaattgactttaaaacatatagactcacatgatttagattatgttgatttaaatgaggcacaagagtttgctttaaaattatttggagatattgttgaatttaaggaggattaagaaatgaattttgcaaatttagtacaacaagcccaacaaatgcaaagaaaggttaataaaataaagaaagaatttgatgaaagagaatttgacattgtttctcaaaataatattattactggtaagatgaaaggaaatctttcaattattgaattacatatcgatcaaactatgtttaatacagataatcaagaagatgttgaagatttgttaatggtaactattaatcaaatgattgataaaatcaataaagaaagggaagatacattgaataaagttactaatggtgttgatgtatctgcgtttatctaatgaattatccagctagttttgaagaacttgttgaatgttttaagatgttacctggaataggaaacaaaggtgctgaacgtatggcttatcatgttttatctatggatgagcaacaagttcaaagattttctgaagcattgattgattttaaaaccaatattcaatattgtaagatttgtggacatatatgtgaaggtgaagtttgtgatatttgccaagatacaactcgtgatcaaacgacaatctgtgttgttgaatcacctaaagatgtatttgcgatggaaaagttaaaagaatatcatggtctgtatcacgttttacatggaacaatgtctattatggatggtaaaactattgaagatttaaatattaatagtttatttgaaagattaaatgataatattaaagaagttatcattgcaacaaatcctacaagagaaggagaaacaacagctttattcttagctaaacttctagctaaacaaaatattccagcaaccagaatagcaaatggattaccaataggaagtaatctagattatgctgacgaattaactttattaaaatcattagaaggaagaaagaaaatataaatcatctcatataataaatgaggtgatttttttgtacaagttaactaaagtatttataagattgcttatggcaacaatttttatatttgtttttaatacatttgaagcaataacacatataacattgtcattaaatatttttaacatttttatgatttcatgttttgatatctttggtgttgctctttgtattgtcttaaaatatatcctttagtcaaattaagaaataatgctttatatctcaaccaaatttttatataatagagtatgaaatgaggtgttataagtgccaggagtatttattacttttgaaggtggagaaggcagtggtaaaacaacaattgctgctttaatcaaagaagcattagataaagaaggatatcaggtgactttaactagagaacctggtggagtagagatagctgaaaaaattagagatatcattcatgatgtcaaatatactaatatggatagaaagactgaagcattgttatatgcagcaagtcgtcgtcaacatttagttgaaaaggtcattccagctttagaacgaaatgaaattgttatttgtgatcgatttgttgatagttcaatggtttatcaaggaattgcacgaggtattggaatcaaagaagtttatgaaatgaatctgtttgcaacagaaaatattttaccaaaacgtacaatcttttttgatattaaacctgaagaaggcttgaaaagagtttatgcaaataaagatcgtgaaattaatagacttgatttggaaacaattgaatttcatcaaaaagtatatgatggttatttatctatatgtgatgaatttaaagatcgtatagtgaaaattgatgcaagtttagatattgatggagtttttcaacaagtcttagaaaagattagagaagtcttatgagttatcaagatcaattaaaacaagaacagccaattctatatcaaatattaaaaaaaagttttcaaagtcaaaagatacctcatgcttttttattagttggtaagaatagtagtatagctgctcattatatcgcaaagagtttaatttgtgaaaatgatgatcttgcatgtaatgaatgtattgattgccaaaaaattgatgaacataaatatgcagattttatttatgctaatgggaaagatgaaacaatcaaaaaaggaattgttgaatatattcaagaacaatttgctaaatcttcaatggaaggtaaagcaaaaatatatttaatggaaaatattgaaaattctacagttgaagctatgaatagtttattaaaagttcttgaagaacctatagctggagtatatgcaatatttacttgtcaaaacttaaatagagtattgccaacaattcaatcacgatgtcaagttattcaattgttgccaggttctaaactgtttttaagagaacagttaaaaaaagatgatctatctgaagatgatattaatattctatctgaattatttgatacatatgaagattgtcagcaatatattgaatcagaagtgtttgataaattgaaattagaagtttatcattttattgaagatttatatctgcatagagaaaatcttgtaattaatgttgaaactcatttaatgaaggactttaaagaaaaggataagattcaattatttttaaatatgcttgttctaggattaagagatttgtttcacgtgaaacattctatgaatcttacctatccatcttataaaggattgtatgatagaatagaagaagatgaaaatcaattagtagagaaaattgatttgatattgaatacagaatatctattaagtacaaatgcaaatgttatgttattaatggatagtttgatgtataaattatagaaaggagactttatggaagaaaagttagctctgatacgttttaataatgtagggaagtcgtattatttttctactgatttagatgtacataaaggagataaagttgttgttgaaacagttagagggttagaattaggtgaacttattactgatttaaaaaatattgatgagtttaaacttgatactgagcttaaaagagttaaaagacgagctaatcgtgctgatttggatttatatgagtttaataaaacaaaagctacaaaatcattagaaatctgtaaaaaaattgttagtcagtatgatttagatatgcgttttgtcaattgtgaatatacattagatgcgtcaaaagtcatttttatgtatacttcagaaagtcgtgttgattttagagagttattaaaagaattagcaagtgtgtttaagtgtcgtattgaattaagacaaattggaccaagagataaatcaaagattgttggaggtttaggttcttgtggattaccattatgttgttcatcattcttaggagaatttgatggtgtctcaattaatatggctaaaaatcaaatgttagcaattaatattgataaaatttcaggagcatgtggtcgtttattatgctgcttgaaatatgaggacgatatctatactgctgaaaaacaaagattccctaaaattggaacacgggtaaaatatgaagataaaattgttaaagtaacaggattaaatgtgataagtgatttagttaaaattgaacatgatggaaatgtttcttttgtatctttaaatgaaattaaaatattgccaccaaaggatcataaacatgaacaacgaggtcactaattatttattagcttatgagaacatgaaaattatccaaagaaaagatatgtttaacttttctttggatactgttttattagcacacttttgtacaattaataaagatttaaatgcaattgttgattttggtacaaataatgctgcaattcctctactattaagtagaagaactgataaaaagattattggtgttgaaatccaaaaagatgctgtcgatttagcaataaaaaatgttgagttaaatcaattggaagatcaaatagagattgtacatagtgatattaaagattatgttaaagaacaaaagaaagtaaaattagttgtttgtaatccaccattttttaaagtgggagaacgcagtaatctcaatgacaatgaatatttacaaattgctcgtcatgagattaaaattaatttagaagaaattgttcaaagtgctgctgcaattttagataataaaggtcgttttgcgatggttcatagaccagatcggatgattgaaattattaattgtatgcaaaagtatgatattgaaccaaaaagaatacgttttgtttatccaaaagtaggaaaagattctcatatctttcttattgaaggaatgtataaaggaaataaaggcgtaaaaattgaagcaccattatatgcgcatgaagatgatggaagctatagtgctgaagtaagaaaaatgtttggagaagatgaacatgaatagacaaaagagttttgaaaatgaaaaaccaacattatatcttgtagcaacaccgatagggaatttaagtgaaatgacatatcgggctgttgaaacattgaaaaatgttaattttattgcagcagaagatacaagaaatactgttaaattattaaaccattttgagatagatacaaagcttatttctcatcatgaacataatctagtaacttcaataccaaagattattcaattgttagaagaaggaaatgacatagctttagtaagtgatgctggatatcctgcaattagtgatccgggttatgaattagttaaagcagcaatatctaaagatattaatattgtacctatttctggagcaaatgcatgtttaaatgctttggttgtctctggtattgcacctcaaccattccttttttatggatttttagatcatcaagataaaaagaaaaagaaggaacttgaacttttaaaaaaatatcaagaaacaattgttttctacgaagctcctcatagaatcaaaaaaacattaaaattaatgttagatatctttggtaatcgtcatattgctttatgccgtgagattacaaaaaagcatgaggaaataaatcgaggaacaattgaagaaattctaacagttgttgatgatatgaaaggtgaaatggtcattgttgttgaaggtgcaatagatgttgaagaagatgttgtttttgaacagagtattgaagaacatgttaatgaatatattgaaaagggtatgtctacaaaagatgctataaaagaagttgctaaacaacgtaatgtatctaagaacgttgtatatcaagaatatcatcaaaaatgaatatagaaatatattcatttttaatttagaatcaagtataataagattagatgagttaggagggaatatgatatgatttatacaataacatttaatccatcaatagattatatggtttcggttgatcattttaaattaggaacagtcaatagaacaagccaagaatatcttttaccaggtgggaaagggattaatgtatctattgttttacataatctaggaatagatagtacagcattaggatttattgctggttttacaggaaaagaaatagaaaatagagtgacaaatgattttggggtacaatgtgactttattgatgttgaaaatggatattcacgtattaattttaaaatgaaaagtgatgaagaaagtgaagtcaatggaaatggtccaatgattaataaggaacacattgataaactatatgataagttatcttgtttacaagcaggggatattctcattctttcaggaagtatacctaaatgtttatcagatgatatatatagtgaaatcatggaaaaacttgctgataagaatattgaaattgtagttgacgctacaggtgatttattaatgaaagtattaaaacataaaccatttgtaattaaaccaaacaatcatgaattagctgaaatgtttcacgtgaaactttttggaactcaggatattgtaaaatatgcaaaaaaattacaagaaatgggtgctaaaaatgttttaatatcaatggcaggagatggggcattatttatttgtgaaaatggaaaagtttatttcagtaatgcacctaaaggccaagtgaaaaattctgtcggagcaggagattcaatggttgctggttttgtagcaggctatgagaaaacaaaagactatgtacaagcgtttagaatgggagttgcaacaggaagtgcaagtgctttttctgaaaatttagcaactgcgagtgaagttgaaaaattattacaagaaattaaagaggtagaatatgaatattagagaccttttaaaagaagatagcataattcttaatcaacatagtcagactaaagaagaagctatagataaacttattgatttacattaccaatgtggacatatcaataacaaagaagaatataagaaagcaatacttgctagagaatcattatcttcaactggagtaggtaatatgatagctattcctcatgctcaagataatagtgttaattatccgtcattagttgtaatggttgataaagaaggtgttgattttgattcattggatcaaaaaacagctaaaatattctttatgattgcagtaaataaagatggtggaacacaacatttagaaatactagcacagttatcacaaattttaatggatgagaaaacagttgaaaaattattaaatgtaacaaccccattagaatttattcaaatattaactgcagatatgcaggaagaaaaagaacaagaaaatgataattattatgatgttgttgcagtcacagcttgtccgacaggaatagctcatacatatatggcggctaaggctttagaagatacagcaaagcaacttggaattagaattaaggtagaaaccaatggtgcaagtggtgttaagaataaattaactgatgaggatattctaaatgcaaaatgtgtcattgtagcagctgataaaaaagttgagatgaaaagattttcaaagaaacctattattaaggttcctgtcgcaaaaggaatacatgaagcaaaagaacttttggaaaaagcaataagtggtgaaggagttaaggaaacagttgaaagtactaaaaaatttagtaagttttttaagaacaataatccattagttattatttatagacattttatgaatggtatttcacagattattcctttattaatgatttatggtatttttacatttattactatatttattaatgataaatttcccgatctacttataaatagtcaagtggtttatgaaggtgttgctccaggagtatcattaagtgaatttgtaagaattatagtcagtatttcatcaataggaaacttatttatactatgtttattaagtgcatatattgcagatagtatcagtgatagaccagcgttctatgttgcctttataactggattgactttatttaacatgagttttattgaaagtgttattgttggttttgtagcaggatatgttattttattacttaaaaagttattttcatttttacctgaggttatagaaagtataattccaaatttactgttaccaataataggaacattcataatgtgtggtatctatttaatattaggattttcatcaaggtattatggtgttgctcaaacagtcccagaaattaatccaattcttttgattggaggatgtacaatcttaggagcaatgatgtcaattgatatgggtggaccagttaataaaattgcatattctattggtattgcaagtatattttataaacatggtgaaataatgtcatcagtgatggttgcaggaatgattccaccaatcatgattggtctttcaatgcttacatcatctaatctttatcaagatgatgaagttaagggaaagtggcattgtatgattaaaggattatgttttgtgagtgaggaggctattccttttatgcgtaaggatagaaagggaattcatttgccttgtattattgcttcagctttagcaggtggattatctgcatactttggatgtagtcaattatttccacatggtggaatctttacaattttctttataaataatccattgttttttgttattacgttattatcttgttcattaataggaatgagtttaattttaattttaaaaaagaaggcattaaattaatgcctttttgtataaaataaaataattttatcatactagatatggtgataaaatgaaagataatagaaaagttgttttaattggaacaggtatggtaggaatgagcatggcatattcattaatgaatacgggtggcattgatgaacttgttttaatagatatagatgaagaaaaggctaaaggtgaagcaatggatcttaatcatgggttaccttatagtatgaataagatggttattaaagcaggtaattataatgaatgtagagatgctgatatagttgtgatttgtgcaggagctaatcaaaaagaaggacaaacacgtttagaacttacaaaagtaaatactagaattatcaaagatatatctttaaaaataaaatacagtggatttcaaggaattgttattgtagcgagtaatccagtagatatcttaagttatgttgtttataaagttatgggtattgataaaagtaaggttattggaacagggactttactagatacagcaaggatgagatatttattaagtgaatatttagatgtttctagtgatgatattgaggcatatattttaggagaacatggtgattcatcatttatctcatggatgaatacatatgttggatgtaagacattaatagaatatgtggaagaaagaaatttagatatgaatgatttaaatgagatttatgatgatgttaaaaatgctgcatatgaaattattgagagaaagaaagcaacatattatggtattggaatttcattaaataaattaatcttatcaatatttaatgatacacataaaatattatgtgtaagtgcatatctagaacatgaatacaaacacagtgatatatttattggtgttccatgtattatttgtaaagaaggtattaaagaagttgttcaattacctttaaatggtgtagatcaagcaaaatttgatgatagttatgaaatattaagagaaatcaaaagagaagtaaaaaaagaattaggattaaattcctaattcttttaatataatctacgatagttatatgcatgattttcccaatatccagataaagatgcagttttaacacattgattaggatattgaccaactgtaccagaaccattaccagcagcatgaacaaagcttccaccaccaatataaattccaatatgagcaacaccacttccataactaaatgtaataacatcaccaggttgtaattgactttttgatatagcttttccacttctagaatatccagcagcagtagtacgaccaattttaacaccggcttctttgtgagcccagaatactaaaccagaacaatcgaagtaagtaggaccatttgcaccccaccagtatcttgccccaatttttgataaagctttttgagcaatagcatttcctacagcagaagatccaggaacatatgaacctccaccgccaccaccgctaggagcctgagacatcaactcagttaatgcagcatcaattttcttttgtgcttcagaaactttctttgattctttttggttatcagaaatttctttttgttgagcagcttttaaattaactaatttttcttgcaaagcaagttgagtgtttttctgtgattgtaaagatgcctttgcattaagcaaagttgccttttgcgtatctaaatttttcttttgagttgtaagttcatcaacaagttctttttcataagaagtaatatcattaatacttgctagacgagagaagaatgatgtaaaatcatcagcaccaaataaaaaatcaatcatccaatttgaattatatgttgattgcataacatataatcgatcttgcatttgtttttcttttttagctatattcttttctatttttgtaatagaagaaagtaaataatcgatttcattttctttagcggttatttgtgaattaagtttagatattttagatgagacatctttaatatcatcatttgttttacttaaatcttcttttgtctctgatatttctttcttcaaatctttattctttttacttaaatattcattaaatttctgacaaacttttttattcgaatttgtcaaagatgatgaacataattttatgtattttgattcattgcctttaaaatcagttgcattaacatttccagcagtcaatgtcatagcaaaaactgaacaaaaagctaagagacttaaaactatttttttcatttaatcacctctctgcttcataattataacataaatgtctaagaatagaccaccaatatttgttaaaacaataaatgttcacatatttcaccatttttaaattttttgacagcatcaacaactgctaacccaactcttagtaatgcttcatcagtagaagcacccatatgtggtgtgtagacaacattgggtaattgaagaagtggatgtgttgactcaacaggttcattttcaagtacatctaaaccagctccagcaatttgatgattaactaaggcataatataaatcatcttgattaacaatagcacctctagctgtattgatgagatatgcagaaggtttcatataagataattctttttttgttatgatatgataggtatcttcatttaaagatgtaccaatagaaacataatctgcttcttttaaaacatcttctaaacaggcacagtattctatcccatattcttgagctaattgaggagtaagggagcgcgaataacctataattcgcatatgaaagccattttttaaaatttctgcagctttaagtgctatttttcctacaccaatcattccaaatgttttatatgaaatttcatgaccaagataagcaataggtgcgactgtattgatttgattatcgagataatcattttgcaataagtgagtttttctagatagttctaacatcattgttacaatcagttcagcaacactcaaagcattatatccgggagtatgacataaatgaatatgttggtgttttaaataatcaacatcaatatcatcatatccactaccatgtataataactaattttaatgattgacattgatcaataaaatgtttatccatttttaaattacgatttattaaaacttcgcactcttgtatttgattaaaatcatcaataatgattccatatttctttaattcgtcataagcattctgatgaattgcttcacataaaaatattttcatgattctcacctcatttacatatattataaagtgttaaaaaattgtgtcaaatgccaagtcaacaaaatcaaaagaacatatagtattttgaaggaggtgaatgcatggttagagatggtattgacgtttcccaatatcaaggtgaaatagattgggaacgtgtaaaagagcatatagattttgcgatattaagatgtggatatggacaggatatacctggacaggatgatccaacatttaaaagaaatgctgatgaatgtacaagattaggaataccttttggtgtttatctctattcctatgcaacggatgaaagggcggctttatcggaagctcgtcatgtcatgagattagttaaagattataaaatggagtatccagtttatttggatttagaggatccacgaattgggagattaacaaatgagcaaattgaaaggaactgtagagtatgggccgatgaattagcaagaaataattacttcccaggattctatgcttcttattactggtggacttctaaattaactggagcattatttacacgttatacaagatgggttgctagatatgctgaagaattaggagcagaaggttttgatatgtggcaatatactgataaaggttttgttgaaggaatcaacgcaccagtcgatagaaattatgctttccgtgatttcccagctgaaataagagctggaggctataacaactttgaaagaccagaaccaaatccagaaccaccaacaatgaattataaagttggagatcatgtcacattcaatcatgtctatatttcttcagatagtagtatacctttaattccatatatgaatcatggaacaattacaagagttgttcctaatgcaagaaatccatatttaattggaaatggattaggttgggttaataacgatagtataacaggaacactcacttatttatcaaacccaacatatcgtggggattcacttgtagatgctttgacacaaataggagtagatgcatcatttgcatcacgtcgtgaaatagcaagaagaaatggaattgaaaattatacaggaagtgcaagacaaaatcttgaattacttcgtttattaagagaaggaagattaaaacaataagggtattgcctcggcaatacttcttttgtttttataaacacgacaataaattacaaaataatattgtattcatgtttgtacaagcgtataataagtgcgtatttttagggaggatattatggtttacgctaaaacaaaagaaaaagaagaatggcaaaagcatgtaacttcattagtttgtgttttaatagcatcacttatcatgtctgtgaatattaaatcatttgtacgtgctggaaatttaataccaggtggttttactggtttatcacttttattacaaagagcagcaaatgattttatggggataagtttaccttattcatttattaatattgctttaaatgctgtaccagcatttattgggtttaagatgattggaaagaaatttacaagttattcagttatgatgattattttaaattctttcttagttgatttaataccagtaacacctattacatatgatccattacttgtttctgtatttgggggaatattaaatggattagctattgttattgcattatatggaaaggcatctagtggtggtactgattttattgctgtatatttatcaaataaattaaagaaaccatcttggaactttgtttttggaattaatgttgttattttaacaacagcaggattattatttggttttgaagaagcaatgtattctattatatttcaatttgtttctactcaaattattgaaagatttcatcaaagagatcaaaaagcaaccttatttattgtaacaaataaagctgaattactagaacaagaattgatgagttttactcatcatggagttacgcgtattgaagggcaaggatgttatttgaaagaaaataaggcaatgctttatacggttgttggagctgatgaagttaaagatgttattcatttattaaaagagttagattcaagtgtatttgttaatatcgttaaatctgaaggggttactggtcgtttttatcaagaaccaattgaataaaaactctgtcatagcgacagagtttttaatatatctacaaatgtttgatttagtaagttaaaagatagattgttttgagaatttaaaagatgttgtccgatataatttaattgttcttcgatataacgattaaaagtaggatctggattatatgagcaatgctcatcattattctttttgaatgttaagatttctaaaatagtatcatgaagataatctggtaataagaataacagtttattgagttcaataggtgggggagattgatattcaataatccataaacaacataataaagttcttaaacaataaagaaactgttttaatgtttgaacattcttatattcatgaaaactcatatgataataatgatgaagaactctttgaatttgaaaatattgtttaaaagcttcatcaatcatatcccattccattgttttcttataaacaatcggggaagctttccattcataaagagtaggatttgatttataaagtaatttaagagctttctttaaatcccaaccattaatatcataaacatcattaagctcataatctatagtatctttaatattctctaaagaaagataatcatttaaaggtcttacataaataaaacgaacatcataatcactatcttgagaatcaaaaccccaagcacgacttccagattcaactgcatagataatctttacattttcttttctctcaatatcatctaacttatttaaaattatatctaacatcatatcacccctaagctttaaaattataaataggtttaataacttgaataattgtagctgtttcacctatattattaacaatatcatccatagacttataagccataggacattcatctaaagtatgttgattaatagaagtggaatagattccttgcatttgatcttcaaattcatttaaagaaaacaattccttagctttttgtcgactatataaacgaccagcaccatgaggagcagattgattccattcttcatttcctttacctaaacatatcaaacttccatcacgcatattaatcggaattaaaatcttttcattaagcttagcagaaacagcaccttttctcataatattttcatcatgatcaatataattatgaattgtttcaaaataatcaaattcttctaaagacatatcaagtaattgctttaaaataatcttagcaatcatctgacgatttaaagtagcatattcttgacatattgccatatcatgtaaatattgatcacgatactttccacttaaataacaaagctctttaggtaactgaacttcttttgcaataaaattctttcttaattccttaatagcttcttgaagctcatcttttcttccttgctttttataatcaacaattaattgttcttgttttaaaagaagctcatcttttcctgccattaaatcataagctaaattttgataatattgagcaacttgtttacctaaattacgactacccgtatgaataactaaataagaatgattgttttcatctacatcaacttcaataaaatgattaccaccacctaaagtcccaatacttctttctattcttttagaatctttcaattccctataacaatataattcttgtaatttatcaaatctcatgattcttccagaatgaactgaagtaccactaggaatatactttctaataatttgatcgagtttttctaaatcaatttgagaatcctttaaatcaacagttaacattccacatccaatatcaacaccaacaatattaggaataaccaattcacctaaatttgcagtaaatccaatcacacatccaaccccagcatgagcatctggcataattcttattttagcatccttagtaaattcttgattacataaagtttgaatttgttcaacagctttctcatctataatatctgtaaagacttttgctgatgaatatataccttttatttctttcattttcatcactccttatcgacacctttattatagacaaagaaagtatacttatcatggaaaaaaagttgcgaacttaacgaagtccacaacttagttgtaattttaatctttcttgaatgagctgaacaaatctttgtggttcaataacttttaacaaaggaccaaaagataaaattctaatgagtaattcagtttcatcttctttttgataaaaaagttcaatacgataagtcttatcattgatttgttctgctttcttttgtaagtcagcaaattgcatcattgctctttctaatgcacttctttcatcataaagttccaatataacagattgtttattttgatagagtttgttatcttggaaagcagtctgttgagtaagttcacaatttgttatttttgagagattaagggttttatgaaaatgatcatgggatgtttttaaacgaaatttattgtcttttaaagaatattctaattttgtgggatgacaaatcaattgtttattttgataagtcaattttaaaatgaattgattttctaaagcataaagaattgtttgaaagttcttgatataaagttcatcatcaaaacaatcaccatcaagatattgatcatagatgagataatcatcatttgtaaataggggttcaatatcatcaagattatcaaaagatatagaaaacaattgaatgcgtggatcaagactgagagattttaaccatcgtttttctaaaagggtaagtggtcgagttaaaggatggtggaggggtgtatggtaatcttgggtgataagaggccaatcttgatttttgagatgagacatgatttcgatgtgactatcttcaaaagcatattgattgataatctcaagaattttatcttgggttaaagtatgatttaaggcatgattgattattttttccatacataaataataacaaccatatatttcatgaaaaatcatgattcatcacttccttttatttgataaagttcatacatttttttgatatcttctttaaattgattttcaattgttcgattagaaaaattaagttttaaaatacgtccaataaaagttcttatccaaggtaatatttcatatgtatcataaatatcaatagaaaattcataacttgtatcattgatttgggttattgttccatgacgtttttcacgttgtaatctttgtaagacatattgttcatgagggagaatttggatagtcattgaaacatgttctaaaggttgtttttcatgacattgtacagaccaaatatgtttttcgatttgttttaatcttgtgcgatagtcatcaaaacaatcacaatcttcactaagtttgatatctttaatatgatcaacacgaaatgttttgatttgtttatatcgataagagtaagctaaaagatgacatcttccattttgtgaacttatataaaggcgtaaaggaacaatatgatatgattggttatgatgatgtattaaataaatacttttcttttgtttcatagcatcaaagattttagccatgatttcactatctatagctcttgaaatataatgatgtttaaaagaaaaatattgtgatgattgtagttggttgagcatataatggccaatgacacctaagggaaagatttcactataatagcttaatgcatattgatatgaagataaatcagttgggtttgttctttgatagtagacttgtttacctaaatgagttgttgttagtattcctaaattaacatattcttttaatttttttcttaatgttgattcatcaaaatgtatagtttgaggaaataaagcaagatattcatcaactttatttaatatttcttgaaacgttaatgattgagaaacatcatataaaatatctaatatataaaaatgtaaagttatatctttatgagtgaagctttttgcttcaaaggctttatataatggattataagtcatttgacgactatcaatagataagaatacagttttagaagtagtatattgaaaagacataaaatcttttaaataactttccaatcttcttttttcattatcataagaacgtttacttttatgagtgatttgatttctatccttaaatccataaatataaaattcatgcatataattacggattctatcaaaatgtttaattaattcactatatcccatattatcaaatcccttctttaatctattgtaagtgagaaaaagaatttagtcaaaaaaaacagattaataaaaatctgttttcattctttcttgtctattttgattatattcatctaataattcttgaaatatatgaatatgcaattgttcatctaaaataatacgattcaaaacatcttgaataataggttcatcaatacaatcaatctgtgattgataaatacgaatcgtattttcttcttctttaattgcattctctaacataatattcatttgacgaggatagacattatatccgggtgaccagtattctaaaaaatcattttgacaatcccaaagtctaggatcaacacctaaatgcgtacacatttcagcaaatatctctagatgatgcatctcaacaaaactaatttcctgcataaccttagcaagttttgaccaagattgtttagtaataacgtggttataaaaataaaggctaacggcattcatttccgagtgaagtcctcctaggttagataacatcatctgaccgtaggctacattcgtatcaagttgttcaacagatgggtatggtttatttacacaatagttcatagaattgacctccatatttatttatatgcgaggcaatttctatttattcaataattttttcaaatccaatacgaggagcaccactttgtaaagtaatccccccacataattcaaaaccattcttctttaaaaaacgttgcattgaaagattatcttcatgtgtatctatacgaatactcgtaacttttaaatttaaacaagcattcacaacataggataataataaagctgcaagattttgtcctttatacttttcatcaacaacaattctatgtataacagcataaggttgatgactcgttttccattgaccatcaatatgaagataattaacatcttcctctatagcaaaatacattgttccaataatattctgttgatcttctaaaacataactacatcctttttgaatatcttctaaaatattttcaatcataggatatccatcctgccattgatcaatgtttgaacgacgaaaataatcttgagcttgatgaacaagctccataatagaagaagcatcgttttcgtttgattttctaatattcatcactattcctccataaagcatataaaattaaatcatgataacacccatctttataaatatgttctctgcgataaccttcttgaataaaaccattcttttctaaaacaatacaagaagctttattctcagcaaaaacatcagcacaaatcttatgaattgtatagtttgaaaagagataagaacataacatcttaataactcgactcataattccttttccccagtattgactatttaaccaataaccaatttcagcatttttaagaaaaatatctttttgaaaagtcacaccaacacaacctacacattttccatcaacaacaatagcaaaatctaaagcatgatgttgtaaagaatgagtaataaaagataaagcatgatctaatgtataaggagctggaaatgagtttcttaaataagtattaatattgggatcattagcataataagcaaattcacaagggtctatctcatctaaactttttaattcaataatcattttaatcctccttaagggagaggcttttcactcgcaaggtagagatcataccattgttggcgagttaactcaacatcacaagcttttacgctttctaataaatgttgaggtgaagttgttccaacaataggttgcatacaagctggatgacgtagtaaccaagcaacagcaattgcactctttgttacatgatattcatcagctagcgcttgcatgacatcatttaatttttgataatcaggattatctaagaatgttccttcagcccatgatgcttgaacaacactccaaggttgaatagtaatgtcttttaaacgacaataatctagaactccaccatctttatcttgagcccaagcttctttcatgttcatattcaatccagaatcaatcatgactgagtgaacaattgataattgtaattgattaataataataggatactttgaatacttttgtaataactcaatttgtaaaggggtatgatttgaaacaccaaaatactttaccttaccagcttcatataattcatcaaaagcttcagcaacttcttttggatcacataaagcatcaggtctatgtaataataaaatatcaacataatcggtattcaatctcatcaaagaatcatcaacactctttaaaatatgctccttagaaaaatcatatctttgtccaggaacaatcgcacatttcgtttgaataatcattttttgacgataatcaggatgacgctttaaaacctcaccaaaaaccttttcagattttcctccaccataaatatcagcatgatcaaagaagttaattccagcatctaatgcagttttaatcaattcatcaacttcatcaacacttttatcagcaattctcatacagcctaaagcgattcttgaaacatttaaatttgtttgtggtaattgaaaatatttcataaatttattcctcctatgttgttattgtactagattatgactataatgtaaaagagtaaaaggaaggttttatgaaatatggataataaagaaataacatggaagcaaagtgctttacaagatataacattaaagcgggttatttattttttattaggagttaatgctttatcaattggtattgttttaaacactaaatcacaattaggtgtaggatcaataacaacgctcccttatgtcttttcctttattacaagctttactttaggaaatgcaattacattactttattttatttttgttgttatacagacatgcttacttaaaaagattgattataagattttaattcaatttcctttttcttttttagtaggaatattgattgatttctatgatgttttattgaatataaaagcaacctatctctttattcaaatatctttattaattattgcaaccttattaacagctttaggagtatatttaatgttaaagggtgatattgttttaaatccttcggatgggattgtccaaacaatagctcaagtttttcatcaaccttttggtaaattaaaaataacttttgatttaagtactattgcattatcttgtttattaggacttatttttaaaggttatattgtaggagtagggattggtacagttataaatgctttttgtattggttattgtgtctcattatatgataagattttaaaacttgaatagaggtgaaagtatggtttatcatattgttaatgttgtggtatatattatatctattgctttatcaatgattggtttaagttgttttagatttgaaaattatattaaaccaaccaaaataaaagaattttacatattctttattgttgcttcagtagcgttaggatatttatttgcatcatttatattatcatttggaacattaagttttagttataattaaggaagttttacatatattgtattatgaaaacaatatatacaaaacttctttttgttatatgtttgatattgattattggatgtttacaatatcaaggtgatattacatatcttttatcaaattatcaaacaaaacaaaaaacaaaagattatatcgttaatgtcaaaaccaaaacaaagactttaaaagttcccttagaagaatatttaataggtgttgttgccggagaaatgcctgtaagttttgagttagaagcattaaaagcacaagttgtagctagtcgtacatttgtattatcaagacatttaaatgttgataatacaaccaattcacaagtttatttaacagatgaacaaatgaaaaagaactggaaaggaagctatagtaaaaataaagctaaaatagaaaaagcaattaaagaaacaagttatgaagcaatgacttatcaaggagaatatatttcagctatgtttttttctagtagtaatgggaaaactgtaaattgtgaagattattttaatggaaaagttgcttatttaaaagctgttgatagtcattgggatttaacaatagatcctactaatactcgaacaaaaacatttactaaacaagcattatcaaaagcttttggaatttcttcgatagatatcaatattacagcttatactaatagtggatatgttaaaacagtcattattaatggaaagaaatatacaggcagacaaataagagaaaaattaggtttagcatcatcatgttttcaaatacaattgacttcaaaaggatatcaatttacaaccaaaggaagtggacatggtgtaggtatgagtcaatatggagcacaagcaatggcgaaagaaaataaaacatatcaagagatattaaaacattattatcaaaatattgaaattaaacgtatagactcataacttttgttcatacttagattgaggtgaaagtatgaagaaaagaccatttaaatacaaaaaagcattaggaattactgtcgcattagcattatttcttggtggaattgggattgtacaaaaaatattagatgatcatacacaaaatttccaagaagaatcagttgctaaggttgatgaaaagaaaacaactacagatgataaacaagaaaagaaaacagttgaaaaattaaaagctccagtaaaagatggaataggaattgtaagatattattataataaagatgatgattctactaaacaagatcaatcattaatattatttgaaggtgtctatcgaccaaatcaaggaattgattatgctaataaaaatgaatcatttgatgttcttgcagcaatgagtggtacagttaccaaaaaaacaaatgatccagttttaggcctagttatcaccataacaaatagtgataagatttccacaacctatgaatctttagctagtgctaatgtagaaatgaatcaatctgttaaacaaggtgatgtcattggtaagagtggagtgaatgtgtatgaagctgatttaaagaatcatttacattttattttacaaaaagatggcaaactttgtaacccagaaaagtatttagatcaatcattaaatacaattaaataatgtatttgagattttagacagtaattgtttaaaatctcttttttataaattttggtaaaattgaggaaatacttttgtagaaatgtataggattatcctttatattttgtgatttataggtatattgagaataaatgagttaaaaatatttgtataattattttattggttattaggctaaaaatatgttgttatagtgattatttttttcttgtatttaatgggaaaaatgttacaatagaaatgcttataggaggaatgtttaaatgaaattatcaaaggaaattggtattgacttaggaacagctaacattcttatttatgttaaaggtgaaggtattgttgttaatgaaccttctgttgtgactattaatactgagacaaatagaccaatcgctgtaggtgaagaagctagagatatgcttggaaagactccaggtaagtttcaagctattcgtcctcttaaagatggtgtcatcgcagattttcaaattactgaaatattattaactcattttattaataaattaaatttaaaaggagttttctcaagaccaacaatcttgatttgttgtccatctaatattacatctattgaaaagagtgctattcaagatgttgctttaagatgtggagcaaaaagagtatatattgaagaagaaccaaaggttgcagctattggagctggtttagatatttctaaaccatctggaaatatggttgttgatattggtgggggaacaactgatgttgctgttctttcattaggtgatattgtaacaagtacatctcttaagattgctggagataagatggatgctgaattaattaaatttgttaaagataaatacaaattattaattggtgatcgtacagcagaagaaattaaaattactattggtagtgcttatgaagcagatccaactgcagttatggatgtaagaggtagagacttagtaactggattacctcatactattcaattaagtgctaaagaaactcaagaagctttagaagaatgttgtatgacaatcttacgtgcaacaaaacaagttcttgaacaaacaccacctgaattatcagctgatattgttaataaaggtattttcttaactggtggaggggctttacttcataacttagataaattcttagaagaaggattaggagttcctgtatttgtagctgacaacgcattagattgtgttgctgaaggttgcggtgtgatgttagaaaacactcaatatttaaaataatgctttcgggcattattttttttcttttcttgtaaatttgagacaagatatttttattttgttagaatgattgacggaggtgttaagtatgggtaaaaagaagtttttcttttttgatattgatggaactttggcagtaggaacaccaggagatcaatatattcctgagtctacaaaattggcattaaagaaattagaggaagaaggacattttttagcaattgcgactggaagaagttatgcaatggctaaagatcatatgaaagaattaggttttaaaaatatggtaagtgatggtggtaatggaattacaataaatgaagaacttattgaaatcaagccacttgattatgataaatgtgtcgcattagtagatgagtgtaaagaaaagggatttatttgggctatttcaccagataatgaaacaagacgtttagctccagataatcgtttttatgattttacgcatgatatatatatggatacagttgtacaagatggtttagatccaagagattttgatcaaatttttaaagtttatgtggcatgttttgcgcctgaagaagaaaagttagagacattgaatgatttaccttggtgtcgttttcataaagaatatttatttgttgaaccaggagataagtcggtaggaattaaagctattgttgatcattttggtggtgattataaggatgttgttgtgtttggtgatgaaaagaatgatttaagtatgtttattgatgaatggacttctatagcaatggggaatgctattgatgaattaaaagaaaaggcaacttatattacaagtgatgccgatgatgatggtatttataatgcttgtaaacattttggatggattgattagtatggataagaagattatattttttgatattgatggaacattgtatcttcctgaattaggaggaattactccagcagtaagagaagctattgctaaaacacaacaaaagggtcatctatgttttattgctagtgggagaccttatggatatattgctgataatgtaaaaaatataggttttgatggttatgtattagctaatggtgctaatattaaatatcagaatcaagatttaagtgtgagagttatgaatcaagaagatgtaaaacaattatgtcaaaagttatctttaaaagatatagaatatgttttacaaactccagatgcttgttatatgaataaaaataatgaatgtcttttaaaattttattctacatgtaatattgattttaagaatttctgttttgattatgatgaagatgaaattattaaaaagacagtgaaaatggaagtatgggttaagaatcaagtagaattagaatatgcaaaatcatgttatggtaagtttgcatatgaattacatcctgataatcatagtatggaagtttatgctaaggatgtttcaaaagcaacaggaattttagatgtcttaaatgaattaaatatttcacttgataatagttattgttttggagatggacctaatgatgtagaaatgtttgaaacagtggctcatcctattgcgatgggaaatgcaattgagattattaaagagaaagctgaaacagtttgtttaagtattcatgaagatggtgttgctcataagttaaatgaattatttgatttgtagaggagaatgtatatgaatacatatgatgttgtagtatttggaagtattaatttagatgttgttacacatgttaaagattatcctcattatggtgattctgttttagctaaaaagattgaaacgattcctggtggaaaaggggcaaatcaggcaattactgtagctaaacaagggagtcagatgttatttattagttccgtaggaaaagatagctctggaaagcaaatgttgcagaatttacaaagctatggggttggtactgataagattctcttgagtgaagaatcaggaacaggaatgtatgtcatttttgtagatgaacatggcgaaaatacaatggcagggagtctaggtgctaatttaacaattcctttagattatattcaagaaacaatgtcaaagattgaagcaaaggttttattgctgcagatggaaacaagtccagaagctattataaaagttatgcaactagcaaaagaaaaagggatgtttgtgattttagatccagccccagcaggggcctattttccagaagtcttaaaatatgctgatgttattacacctaatcaacaagaaacacaaatgattacaggaatacatgtagataatcaagaatcagctttattagcagctaagaaaattgaagaacttggtgtcaagaattgtattattaaaatgggatcaaaaggaaatcttgtttatcaatcaggacaaacaacgtatatcccatcaattaaagtcaaagctttaaatactgtaggagcaggggatacttttgctggagctctagcaagtcaatatgtcaaaacaaatgatttagtagaagcagttaaatatgcgaatattgctgcgggaattaaagtttctcgaaatggtggacaagaagttattcctacttatcaagaagttattgattatatgaatgaaaaatattaagacttattcgattcattattgaataagtttttctttcattataaaatagatatctaatgaggtgagattatgaagattattgcttgtgttgatgaaaatttaggattaatgtttcatcataggagacaatcacaagataggattgtaagagagagaattaagactataacaaagaagctttatatgaatcaatattcttatcagttatatcaggatttatttgatgaagcgattgttgatgagaagtttatggatatagctaaggataatgattattgtttaattgagaatgtgagtattgattgtaaggatattgatgaagttattttattttattggaatagagaatatccggcagatttttatttgaatattgatttaaatcagtttgttattgtgagtcaagaagaatttacaggttcttcacatgatcttattactcaagttatttatcgaaaggaataaagtatgcgaaagaaaacatataaaaagaaaatctatagtttagtcgtagcactagctgtcgttgttggtggttatatcacaactcaacttaatcaaccagagagtgtacaaaatattgaagatatcccagcttataaaaacaagccgtatgttgaacttaatgatggaaaaccatatttcactgaaaaagatttaacgactaaatcatttgaaaaatatagtccattagattcattaggaagatgtggagtagcttatgctaatgtttctaaaaagacaatgcctacagaaaaaagaggttctataggacaagtaaagcctagtggctggcaaactagaaaatatgattttgttgatggaaaatatttatataatcgttgtcatttaattggttatcagttaactggagaaaatgctaatgaaagaaatttaatcacaggaacaagatatatgaataccaaaggtatgttatattttgaaaatatggttgctgattatgtaaaagaaacaaacaatcatgttttatatcgtgtaacaccagtttatgagggagataatcttgtagctgatggtgtcatcatggaagctatgtcagtagaagatgaaggattagatattgaatttaatgtctttgtctataatgttcaacctggagttaatattaattatgctaatggaaaaagtcatttagcaaaagaaaagtaacaaatacaaaatgtacttgttacttttttacttatttagtaattttaaaatgatgtcctggttttacaaaatccaataacattaattcttcaggtttgactgttgctactaaattacgttcaccgtcattaggaatctcagttaaaacaatttctaattctccacgataatgagctaaattatcattaacaactaatacatcaccacgagtaaagactttcttacctggatctctataaggaatagattgtgaatcaatttgtttatctgtcactgtagcaactgatccatcttgaacacttttcttttccttaaaccaaactcttgacatagaagaacgtaacataaatgaagaatgatcataacgatcccaatgaggagcatattcatacataaccattctttcattatcaataacaccttctgcttcatcaactctaatttgaagaacttgtaaatcaacattagctaaagcttctaattcctcatcactagcaggatagttaccaattaaaatatcatcaacatcaccagttgctaataaataacgagcttgaagatcaattggtaaacctctcataatttcaacagttggtaaaccacagaaaacttcccatggtccaattgtattttcattgttactagaaacaaaagcagcagtatgtaaatttaattctttccaataactattgtattccataaataaatcaaaatctaaaccagaataacgttctgggaagaagttatggcacatagtcatttgatccttgttaccacctctattaattaataattcaacacccatatccatacttgcattaaattcaattttaatattgtaaggattacgtgttaattgaatatccccttgagtaccaaagtttccatccattctgataatatcaagtcccaaatcagcgaatggttttaaattatctggagttgctccaattaatttaaagacttctggatttgtatcggcagcaacctcaaatcctaattcatgagcctttgtcataaattccttaaattcaactaaataactttcccttttatcttcagggatagataagaaacatgtaaaaattctgctatatcccaatttagcagctttttccatgtatgcgtatacctcatctctaggagatttatctgggtatacggaaatacctaatttgtgcatattcgttttcctccttgtacgccattattataccatttttataataaatatttaagggtaaaaaagattttctataaatttgcttcaatttgtaatataatacattaaagaaaggggcattgatatgagtttagaaatatgtttatcttttgtggtaacatttatcataagtttaattcttgttcctattgtaagcaaagtatcaaaaaaacttggtatcattgctcatacaaataaaagaacaatccataaaggaattattgcaagaactggtggttatgctatttatgcaagtttcttaattggaacaatgatttttttaaaaaccgatattcaaatcaattcaatattgattggtggttttattgtatttttaacagggttctatgatgatattcatgatttatcacctaaatttaaaatgttaggacagattattgcggcattggttgttattgtttatggaggaatttctttaaaagggtttataattccatttttgccatcttctttttctcatgttattgcaattattattacgattggatggattgtagggattagtaatgcagtgaatttgattgatggattagatggtttatgtggaggaatttcaattattgtcttagtgacaatatctttgacttctttaacttatggaagaaccgatatttcatctttatctttacttcttgctggagctattggtggtttcttggtttataactttcatcctgcttctgtctttttaggagactgtggagctttgtttattggttatatgatagctgttatttctttattaggctttggttataagagttcatcgttctttactttaggagcaccaatcgttgttttaatggttcctattatggatactttaattgcgattattagaagaaaagttcatcataaaagctttagtgaagccgataagaaccatttacaccataagttaatgttttcattagaattaggacaaacaaaaagtgttctcattttatatgtagtaacaatattattctcactttgttcatacatctatctttatgataaaatagcagcaactattctctttttaacactaatgttattatttgaagtctttgtcgaagcaacaaatatgatagatcgtaaatataaaccagttttaacaattatgaatatttttattaaaagtgaatatttaccttcgattaaagatactaaaccttatcgtagaattgttgaaagagcaaagaagaagtatgcggttattgcacttattgttatagcaattatcttttcacttgtctttgctttcaataaacaaaattcaactcctacacataaacctgttcaaacagttgaatataaagaagctgataatgaaacagaactaatgagtgatatttataatcaattaaaaacggctattgaaagaaataataaaccagatataagacaagatgtggcagcatatttcttggctgattattttactttatctaataaaaaagaaaatcaaataggtggtattcattatttctatagtgataaaaaagatgattttacagcttatgctaaaaatggatattataagaatgcaaatacctttataaaaaatcaaacagatttaccagaagttatccattatgatatcatttctaatcaagattcatataaagctttatctggattagaagattatagttattatgatgtaagaattaaaataacatttgctgatgtgaatccaattttaaatgtagaagaatacacaacaacagtcactttaattgaaaaaaatcaaagatttagtgttgttgcaatggaagaataattatggataaatttatatatgttggaataggtggagcaattggagctattttaagatatggaatcagttgtttacctattaaaaatgattttccaatcttaactttaataacaaatatgttaggagcattattgattgggattgttgttggtttggctgaaagagagaatatatcttcatcaatgacattgtttttaaagactggggtttgtggaggctttacaaccttctctacgttttcattagaggctatgaatttgatggatatgggaaagtatggcgtttcattgttatatattggattgagtgtgatgggatgtttaataggggtatggcttggcaaacagatcattcgtttataggagatttcttttgagaaatctctttttttaatttaattatgtgaaatttatgtgaaatgaaaataaaaaaagaaaaatggggctttaggttcgtatatatatagtagaggggttatttgataaaaagataaatcaaaaaaactttctcaaatttaaaaagaaagagaggtgaaaaaatggagactgaaataacgaaagaaatgtatgaaacagcaattcaacaaagttgtttgatggataatctctttatgaagattgtttttagagattatcgctgtattcaattgttcaaagatattgtctttcctaatgaaggagatatcatttctgtatattcaaaatatgaatttcaaagagataatctaccttttgattttatctttgaattagaagggagacattttgttggagtgtgtgtacatacccaagagtatgcagccaaaacaagaaatgaggtgtatgaagaaagagagttcaataaagcaagttggccaaatcatgagtggagtcgtttaccaattatttcgactgtcattattacaaatgaagatatgtttgatgaagggaaaacaatttactatatagatcatgatgaaaatgatgaatatgatcatatagctcagaaaggcttagatttgatttttatgaatacagcatatcaggatgaatcaccaataggaaaacttgcccatgatttggtatgtgtaaatcctgatgatatgtattatgaagttttaaaagaaagagtacgtttttataaagaagatcgaggagggatagaagcaatgtgtgaaagtataagtcaatttgaaaaaaaggctaaacaagatggatttaatgaaggaaggcaaaaaggaaaagctgaaatgattaataattatgccgtgaaacataatatatcatatcaagaagcaatggaagaattaggattacctgaagaagaaagaccaaaacttataagagtaattatttgtacaaactaatacaaaggtcatagatagaaatatctatgaccagtattttttcaaatatatgtgtaaatatcaaacaaattattatataatgacaaagtaaaagttgataaatttgttggttaaagtataaagatactttatcaaaatggaatcaggtgaaaatcctgagctgtcccgcagccgtaaaagggagttgaagcaatatgtcactgggaaactgggaaggcgctgatacgatgaacttgagccggaatacatgccaacatcttagaatacactttacggtgaataaagtagttctagtctaaagtctaggacgagtacgtcctattttttgtctagaagaattggaggacaaagaaatgaaaaaagttttaacaagtctatggattgtgatgactttaatagcaagtcagttcacaatgactcatgccatgagttatgaagaaagctatcagacagcaaaaagctattatcaaaagaaaaccgtcttacaaagtacagatgaagtctttgcttatgcatcattaggtttagatgtatcatctttgccagtagaaaatattgtgaataccggatatgcttctgatattgctaagacagttattgcacttactttacataaggatgatccaagaaactatcaaggagttaattatgttgagatgctagaaggatgcgtacatgataatggggcattcgataagaaaaaagattccacagaagccaatttccagctttatggtgtttatgcactctatgttattaaatctgataaattagctattgcagcagattatcttgcatcattgatagatgaacaaggagcctttggttcaagctggggtccaagtttagatgttacagcatgggtcattgaagcattaagtctagttgatacagcaaaatatcaagaagtcatcgatcaggcacttgcctacattcaatctacacaagatgaaacaggtggctatgctgatagctatatgggagtcaatgtgaatacccaagcatgtgtcttgatgggattgttggcttatgatgcagcaggggtcaaaggaacaacttacaataagggagacaataatccctatgatcttttattgaaatatcaaaacagcaacggaagcttttattatagtgagctaggtgaagaaaactattatgcaacacttcaaggtgtgcaagctgttggttactataatcatggttcactttataagagtgcacaagccttatatcaagagattatatctcaacctgttaaagaggaagttaaggaagaaccagtgaaaaaggaagaaaacaagccagcaccacagaaagataaaaccagtgaagctaaaccacaaaagacaaaagtcgttaagacaagtgatagttctctattaggagcttatttaggaatgttgttattgagtggatgggttgttgttaaaggaagaaaatattttggataaaacaaagaaatatacaatagtctttgtcgttatatgctttatcattatcggtgttattggaatctatcgtacaaccacacctttgccaaaagaaaagccggttgctgaaaaaacagaaacggtagagacacctcaaaaagaggacaccctaacaacaaaagaagataagaaagaaactgaggataaacctaagaaagaacagcaaccagaaacgacaaagaaagagaaaaagcagacaaccaatacaacaacaaaccaaacaacacaacagactcctcaagaaaaacctaaatatgaagaagtcaaaccacaaaaagataaagttcaagtaagcattcaaggggcagatgtatttactattaatcaaactattgagatagaaaaagatcaaagtgtctatgatgttctaaaaagcctagctacaatgaaaaagatagacgtcaataccaatggttttggcccagcaatctatgtaagaggaattaatggattaaatgaatttgaccaaggacctcaatctggttggaaatataaagtcaatggtacttttccaagtgccagtgccgcaacatataaagttaataatggtgatacagtagaatggatttatattatcaatgagtaaagttaaagaaataagtctgattggtattttagcagcagtcaatattgcttctagaatagccttacaagctgttccaaatgtcaaaccagtgacatcgattattattctatcggttatgatttttggtttggcatttggaatcaaattaactttagttacaactttagtttctaacatttatttagggatgggaatctggactttctttcaaattttagcatggatagtgatatgtttactaacacagatgattattgatttttataaaaaattaaataaaaaaccaaatatattagttatggcaatatttgcttttataatgggatatgtttttggatttattgtatcattagataaatttgttattggtggaccatcattatttattgtttattatttagctggattattgtttgatacatttcatgcagtaggaaattttttgttctttttcttatgtgcacccattttattaaaggtgtttaaattgaacataaaaaattagtttgttttctataatgagtaagagaaaagcttgtaatttacttggtcttatggtattatagcaatgctagtgtataaaaatttgatgaaaaggaggtactcagatgattttaaatgtattattaatgattgtttcagttgctcttataattgtatgcctattacaaagtggaaaatcagatggtatcgttaacgccttgactggtcaaagttctaatctttttgctcatcaaaaagaaagaggagctgacttagtactttctagaattactgttggacttgcaatcgcgtttttcgttattgcaatcttaattagaatgggttaatcaatggggcacactatgtgtcctatttttatttatattgggtagaataaaagggaggtgaaattatgaaagaggatatattaaaattattagaagatagaacttatacaagaagaaagattaatgaactagctgaatattttcatatgactgatacgactgattatatttcttttattaaattgataaatgaaatggaagaagaaggtttaattgttagaagtaaatttaatgattattatttaattaatcagttaaacttttatagtggtgtgttagaagttaataagaaaggttttggatttgttagaattgatgaagaaactgaattttatgttcatgaatcaaatatgaaagatgccttaaataaagatactgtcttgattgaaaaaattcctggacatgggaatcgtgaagaaggacgtgttatacgtgttattaagcgtggacaattaagatatgttggagaagttaaacgtggaaaaagagattattttgttaaggcagatgattccaagtttgaaaaaccaattattgttgattcggcacatatgcatggagctatgcctggacataaagttgttgttgaagtgaaaacatttaaaccacagattaaaggtgatattgttaagattataggacatcgtaatgatcctggtgttgatattttatcaattgttcatgctcatgatgtggatattgaatttcctgaagaagtatatcagcaaatagaaaatattcccgaggaaatagatcctagtgatattgaaaatcgtgttgatttaagaaatgaagttattgtaactattgatggtgatgatgctaaggatttagatgatgctatctctttaaagaaattggataatggtcattatcaattaggtgttcatattgctgatgtttcttattatgtgactgaaggttcaccattagataaagaagcagtaaaaagaggaacgtctatttatttagttgatagagtcattccaatgttgccacataagttatcaaatggaatttgttcattaaatcctaatacagatcgatatacaataagttgtataatggaaatagataagaatggtgaagttgttaatcatgagattattccatcagttattcattcatcttatcgtatgacctataacaatgtgaatgctatattagatggtgatttcccattacaacaaaaatatgagaaagttgtgccattatttttcttaatgcaagagctagcaactcttttaagaagtaaaagagatgaaagaggagctattgattttgatgtcaatgaggctaaggtattagttgatgaaaaaggacatccaacagatgttgttttaaggacaagaggtgcctcagataagattattgaagaatttatgttgaaagctaatgaaactgttgctcaacatttcaaatggatggatttaccatttatctatcgtgttcatgaacatcctaagttaaagaaacttcaacaatttgcagcaattgtaaaaccacttggttatacaattaaaggttcattagaacatgtttatccaaatgaattaagtgctattgtcgaagcttcaaagggaacagaagaacatacagttatttcaacattgttgttaagatgtatgcaaaaagcacgatatgatcgtcaatgtttaggacactttggattagctgatgaatattatacacactttacatctccaatacgtcgttatccagatttattggtacatagatgtattagaaatttcttgtttgaacaaaattatgaagaaacagctcattttgaagctgttattcctgaattggcagaacaatcttcttttagagaaagagaatctattgatattgaacgagaagttatggatatgaagatggctgaatatatggaaagtcatattggtgaagaatttgaaggtattatttcttcaattacacaatttggtttctttgttgagttacctaatactgttgatggtttggttcatattactgatttaacagatgattattatcattatgatgagaagaatattatgttaagaggtgaaagaactggtaagacttttaaattgtcagataaagtaaaagtaagagttattggttctagtaaaaaagagagaactgttgattttgaacttgtgggaatgaaagcaagagtaaaaaaattgaaaacaattcatttaaatgacaaaaaagtaaagacaaatcgaaagaaaaaaggtaaaataaataaggctagaagatttactagacaaaaaagaagatagaaaggaagtgatgtgtatgaagatcgtttcacaaaataaaaaagcgtatcatgatttctttatcttagatacttatgaagcaggtattgaattaaaagggacagagattaaatcagtgcgtaagggtagtgtgaatttaaaagattcatttattcgtattaagaatgatgaagcctttattgaaaacatgcacatcgctccttatgaacaaggcaatcgttttaatcatgagccacttcgtacaagaaaattgttacttcataaaaaacaaataaagaagttacaaaaagaagtgaaagaaaatggtttaacgattgttcctactaaattatatttcaatacttcaaaactaaaagtagaagttgctttagcaagaggtaagaaattatatgacaaacgtcaagatcttaaagaaaaagattctaaacgtgacattgaaagagcattgaaaaatgcttactaatgggggcgtcttggattcgacaggggtcagtttgaatggagttgcagccgtgggcacacgttacatgtacaaacaaatatctggaaacagacaaactaattacgctttcgcttagtcgacatagacatgaaagctgccactatatagcgtgcctatagctatataactggtaccataactcataggataagggtgtaaggagtctggacttatatcacgaaaatttacagaatcgctaagtgaaagactgcttgtggatcgtagcttagttaaacccattccacaagataagctgtagacgcttcatatgggacggcttttggacgcgggttcgattcccgccgcctccaccataaaagtaattgatcgaatacatattacttatgtattcgttttttatagaaagggtgtgtttttcatgaattatatcttaaaacaatttgataatgatttattgtatttttctatggaaaatacaaatgatggattacaagttcatataacttcatttaatgaaaatatgaaaaatcatcttcctttagatttagaaattgatgataaatcattaaagcgatggctggaaaaaagaactattccaagaaatagagcatatgtatcaaattttttagcacgacttggattaaacgaaaaagatacaaagggtattattgaaatatgtcaaggtttatcactcaatgatagttattgggttgttaaagaagattgtaaagatttgtttgctgataaaaacctttatacaaattcatttaatacaaatattgcatcaattgcatttactggatatggaagttatacaagatcatcttttcgttcttctccagaatttactacaaatggtatgcttgcaaaatcatggaggagaataaaaggaaaagtcattctttataaatcaggaacagagggttttgcgaatagtgggctagaaccatattcagaattttatgcaagtcaagttgcaaaaacaatggaattaaatcatattgattatgatttatctaaatggaaaggaaaattatgctcaacttgtgaattgttcacaagccagaatatttcatttattcctgttggtagattagtaaaaactggcggtattgaagccgttatagattactataagaatctaggtgaagattattatcaagaacttatagatatgctggtttttgatgctgttatcttaaatgaagatagacactttggtaattttggattattagttgatagtcatacaaacaagataatagctcctgcaccaatctttgataatggattatctttattatgctatgcaatggacagcgattttaatgatataaatacttatgtttcaactcgtctacctgcaacctatcaggattttataggatttgtaaaacctttaatgacatctagacaaaaagataaattaagaaaattaattaactttaagtttgatagaaatacaagatataaattatcaaataaacgtttaaaacaattagaaaaaataattcaagaaagagtgatattattattagaatagtaatatcactcgtttttatattgaataaagctttgttactttgtcttttctttatgattttatatctaattgttgaaataaagtttctgtgataaaataaatttaaagaggggcgattaatgtgttaatagaagaaagaattgatgacattaactggactgcaaatgaaaaaattgtaattgagtttataagaaataagcaagaaaatataagacattatactacaacaatgatagctaaagaaacttatacatccccatctatattggttagaattgctaacaaattaggttatgatggatatctagcttttaaggatgcttatttggaagaaatgacttatttaaaaagtagatttaaaaatattgatgccaataaaccttttaaagctaatgatgatattatgacaattgctaataagattacaaaactaaaaactgaaagtttagaggatacattatctttaataaatcatgatgatttaaggaaagcaattaatttaattgaaaaatgtgaagtcataaagattttcgctatttcaaacttgtgttttttggccgaggaagcctgttttaaatttagacacattggaaaaaaatgtgaaacttactcttatagcaatatgatgtatcaagaagctataatgtcagatagtcaaacatgtgctatttgtatttcttattcaggagtttctaatgaacttatagaaactgctaaattattaaaaaataatgatgttcctattatagctataacaagtattggagaaaatgatttatctaagatttcaaatgtaaagctgtctttgacaacaagggagaagtcttatacaaagatagcaggattttctacaattgaatctattagtttggttttagacatactatattcatgctattttgcaagtaattttgataatcactttgtttataaaacaaaagtggctgaatcaactgaaaaaagaaagaaaacaaatattattattgatgaaatatcagattagaaagactttctataatttaaaggatttttataaggaattatagaaagcctttttttaatactttcaatgtatttactttatgatgcgtatcaatataatgatggtgaaaaaaagaaaaagaggaggtttgttatgaaagcagtagtcattggcgggaaaggacatattggaacatatttatgccctatgcttgtaaaaaatggatttgaggttgtaagtattacacgtggaaatagtcaaccatatgaagatgattatgcgtggaaagatgtagaaagtgtatttttagatagaaataaatgttcaaactttgaggaacaggttatttctatgaacccagatataattattgatcttgttaattttaatattgaagatactaaaaaaatggtagaggctatcaaaaagtcaaatgtctcacactatttatattgttcatcttgttgggcccatgggatggcagaaatattaccatttaataaagatgatatgaataaagttccattagacgaatatggtaaagataaatttgctagtgaaatgtatcttaaggaagaatacagaaaaaatggattccctgctacgattgtaatgccaggacaaatatcaggaccaggatggacaattatcaatccttggggaaatacttctatgagagttattcaagatattgcagatggtaaagaaattgctttaccaaactttgggatggaaattattcatcatgtgcatggatatgatgttgcgcaagtctttatgaatgctataacacatagaaatgtatcactaggagaaagttttgatgccgaagctgaaaatagcattactttatatggatatgctaaacatttatatgagttctttggtcatgaaccaaagattaaattcttgggttggaacgagtggtgtgaatatgaaggaaacgaagaagaatgtgagcatacttattatcatattatacgtagtggaacatttagcattgaaaaggaaaaaagattattagaatataaaccaaaatatacaaatcttgaaactatagatttagctattcaaagttatatagatagagggttaatttctgtcaaaagataaaatacatatgttgaataattttaaataacttattgattatgaattcaaataaaaaaacaagattcttgaaaataaaaatcttgttttttaatatatcaaaacaaggaggagtaatatgctcattggaataatatttatactattgtttgttttagcatctggaggacaaatgtgttttaataagttttatcagcaaaatgttgaaaataccctggtgagtcattatatttacttattagtaatgagttttcttgcagctatctgttattatattttagctgatttcaatcttcaaatagatactatgtcttttatttatgctttaatggcttgtttggttatagttgcttgtcaaatattaacattgatatgtatggcaaatgttaatctaacaatggttacggtttctacgaatgcaggcaatttactttggtcaactttatttggaatgatctttttaaatgaaaaaatatctactacaacaataataggcattattttcattttattagcgttttttgtgccatttatatttaattataatgaaataaaaaatgataaaacaacaaaaattggatatatcatttgtatactgttatttttagtaagtggtcatgtgaatagtattaataaactatttacactaagtaatagttctacttctaattcatcatatttatcgtggatcaatatcattatgtttccactagttttattggcttttgtttttttaataaagcgttctaaacaatcattaaaaatactaacaaaaaatattgattttagatattatggttttgtggcaattggaacagtcattggctgttttggaatgttgttttcttttgaagcattagctaggttagatgtatcgttatattcaccattatactcttcaatatatattatttttctaactatagtatcaagattcttatttaaggagaaattgaagaaagaaaattatctttccattggtttagcacttatatcagttgtattttgttcaatataaatggaatgattaagtatgaagatgtaaaacagaatcacaaatataaaaattcatatgtatatttatatataaatatgatatattattgacgagatgataatcatggaaaatattattattaagccaatatttgacttgagaactaaattgtctgaaatttcaaagattgttcacgaaactcgtaaacctatttatttaactaagaatggatgtggagatatggttcttatgagtatggatgcttatcaagatatgatggaagaaaatgaaatatatctttaaacgtgatttaaaggatattgtaagatatatacctattgatcttgataataagaaagcagctcatgatattgtagaaaaaatacagggtaaaattgaattgttaaagcataatccaaagaattattgagctattaaaggctttatctgctctgtgaagatgaagtagtatagcattgctcaggttataatatcctagcaacatccaaactgagtgttaaattcattttttattaattgaaatagatgcagtgagaactgttttttaatatagtccaacaaaatacatatttgctgaacagcctgaagttaagaaggccttatggggtagaagtttttggagtagcaaattttttgtttcgagttgtgaaaaggatacgagtgagaaaacaataaaagaatatatcaagaatcaaggtaaacaagattcttatgaacaaatattcctaaaattatcatcacaatgttttcaaataccctactataaatatcaagaggacatttgtaagggtagtttgttgtaaacgtattaaaaatgtaaatatataggggaagaaggtttggtatgattaaattttttaagatgaacatggaacctaaaaaaaggttaagaatggtagaagtaatattttcaataggattatgtattgcttcgattatatcaattggatatggcttgtatgatattaatgctaatgttgaaaatgcaaagtttaaacaaagtatccaaatgaccagagatactgatttagaagattatagtgaagataacacagtttgtgctgttacttatacaaatggtgacaagcaacttattgtttcttattcatatgaagactatactaaattaaatgatatgacaattacagcatatgaatacgaaacaaaaaacggaacaaaattatattttgatcaccaaaatataaacaatcaagaagtacagtattcctacaaacaagtaagagctaatgaattagctccgttatttaactttgggattgcttcttttatcttgatgttatctattttaattatgatgttatttgcgaaacaatttacaacatatgaaaaatcgtggtttatttcaattatggttctagcaacggttttttccgtattattcccagaagaaagtgctaatggggtcaatggaattatcattatgctgctttatttgttagacacattcttaaatattctctgtgaattattgatttctaaacaatcacggtataattttcttgtttcagtattagttgaaattgttgaaattgctatgtgtgtagtattaatgtatcgatttgctacaatggcaacaacattatttttctggctgccaattgatattattagttatataaattggtcaaaacacaaggatgatgaagaaaatgaattaacggtagtaagaaaactaaaaggatatcaggaagttttagttattatcggaatcattgtttggacgtttgtcattggataccttattagtggtttaaatattgctacagatttttataacaatgaattattagaaacattcattatctatattgatgcttgtgcctcagctgtaggaattgcaaatggattgtttattttctttaggttgcaagaacagtggattgcatggtatatttgtgcatttcttgaagccattataaatattatttcgggtcaatatgttttattagttctaaaattaggttattttactaatacaacatatggttatatcaagtggagtaggtatattaaggaacattcaatacaaaaacaagcacaaatatcataatgtgtcttgaggaatgatgttaaaattgatagaataaagtatatattaatatattcaagatgaggagtgaaaatatggctatattagcaggtgattttaaaacaggattaactttgattattgatggcgatccttgccaagttatggactttcaacatgtaaaaccaggaaaaggagcggccatcttaaaaacaaagatgagaaatttaaaaactggatcgattcaagaaagaaactttaatgcatcgactaagtttgaagcagcaaatatttcaagaaaagatgcgcaatattcatataaggcagattctactttttattttatggatctagaaacatatgaaacatatgaattggctgaagatcaagtaggggacaatcaatattatattattgaaggttcaactgtttcattaatgttctttgatggattattgttatcagtatctgttcctgaaaaagtagaattaacggtagttgaaactgatcctgccatcaagggggcaccatctaaccaaacaaaagatgctgttactgatacagggttaacattacgtgttcctcagtttattaatactggagaaaaaatcgttgtgtttacaactgatggaaagtatgcaggaagagcttaataagctctttttaaaaatatgaataaaattgtattgattactggaggagctaaaggaattggcaaagctatagctttagaattagcaaaacaaggatatgatattgtcattaattatttgacttctaaaaaagaagctgaggcattaaaagatatgattattgataattatggtgtacgttgtttagcaattgcaggagatgtttctaaagaagatgaagtagatgaaatggtatctttgattgagacagaacttggcggtgttgatattttgattaataatgcagccatagatttatcaaatttattccatttaaagaatgctgaagaatttagaagaacattagatgtaaatgtagtaggagcatttaattgtagtaaacgtgtttatcgtcatatgattgatcaagaatatggaaaaatcattaatatcgcatcaacaaatggcattaatacttattatccaatgtgtattgattatgatgcatctaaagcggcattgatttctatgacacataatcttgcctttgaatttgccccttttgttaatgtaaactgtattgctcctggcttcattggtacagaaaatgaactggatggttatgatgagcaatttttaaaagaagaggttgaaaaaatcatggttaatcgctatggagatcctcaagaagtcgcttatctagtaaagtttttagtaagcaaagaagctgattttattaataatactgtaattcgaattgatggtggacaaaaaggaagttgctaatccaacttccttttcatatttgataacgctaataaaatagataattttccatactcaaaggttaaaccaccttgcatatataaagtatatggttcaataacaggagcatcagcacttaattcgattgtactgccttgagtaaagctacccgcagccataacctcatcaaaaggatatcctggcattggagctggtaaaacatggacaaatgaatcaatcggactgctttgttgaataccttgagtaaagtttactaaattctccttagatttaagttccaatgtttgaataatatcagttcgtggttcatcatagcggggagatacgtttgaatattctagtttttccaacatataagctgtaaatatagcagtctttaacgcgttttttacggcattaggtgccatgaaaattcctttaaaaaatgcattgtttaaattgaaattagcccctaaatcttttcctattcctggagccgttaatctttcagctaccatataaaccaaatcttgattaccggctatatatcctccagttggagcaatcccaccaccaagattcttcattaaagatccaacaacaatatcagcaccaacatgtccaggttctttagtttctaccaattcaccataacaattatctaccataataatgactttatcattgacttcacgaatctttttaatgatccgttcaatcttttctattgataacgacttacgatgtgaataacctctagatctttgaatttcaactaatttaatattattttcttttaaacgttcaataatcgtttgatcatcaaaatcatcattaattaattcgatttgttcatacttcactcccgcagcttttaacgactgacttgaatttccacttattccaatcatttcttgaagtgaatcataaggagctccagacaatgagatcatagtgtcaccatgttttaacaaggcagaaagagtaatgtataaagcatttgttccactcataatttgaggacgtactaaagcatcctcacaaccaagaacagttgcaaaaatcttttcaatcttatttcttccctcatcatagtttccataaccattaatatcactaaaatcagagtaagaaactttattttcaataaaagcagataagattcgattagaatttattagacaaatagagtcaattttttcgtagatgtcatgtaaaactgtatcagattctttagctaaagtaagtagatctgaatttatttgttcaagtaacataaaaaaacctcctataaataatacattgtttattatacacatttcttgcattgatatctattgaagaaatataaataaattaaggaaataaaaaatctcaagtataaagcaatgactaagaattgaaatgtgtgatattcaatcggtttattgttaaattattcttgataacatgattgaagctgttttatcaaaaaattggcacaacgagattaaaattttaactacattatcattagtgtggaatgatgaattatgttctaatgtgtaatttacctttaaaatagataatttttattttttattttattgatttttgttgaattagaatttatcatgtgtataattcagtttaaatagtttgatgtttttattatgttaggagaaactttttatgaatattaaaatagaaaagattgacttttcttataaaagaaatcaaatttttaatgatttttcaacaaatttacaattcaataaggattgcatagttttaatgggacataatggtgctggaaagacaacattattaaatttaatatgcggtattttaaaaccacttcatggaacaatcacggttgacagagaattagatatggcatatttgccatttgataataatatatatgctaatttgacagtgttaggaaacataacattttggtatcaaatatataataataagcaattagatttaaaaaatgaatttttcaattacttaatagatgctttaaaattgagaaagctattacatactaaaagtatttctttatcatcaggtgaagaaaaaaaattagcatttttaataattttattaagtaatgcaaaattaattatattagatgagccattcaatgggatagatccaatatctattttagaaattacaaatttaataaatacgttaagaaaaaaaggaacaaattttttaatatcttcacatcagttagatatacttgaaaaagtggcaacacaatatataataatgaaagattatcaaatacttgaaatgggaaatatgaatcgagtagacacagtttcattatatgataaatatgaaaaaatctataaggatgattattatgatgaatatatttaaagtacaattacaactaaaaaatcctaaaaaaactatttctattttattattttgtagcttatgttttgggggattaacaatatatatgtgtagtgcacccttaaatatatttttgacaaatgaagtaatggatttcatatcaaaaaaaatcgcattgtcttatttatcactattagcgattacaggtccgatggtttttcttgcattcaatggatttatagaagataagcctatatttatgtcacttctagcaagaaaaatcaatatttttaattttattatcagtaaaatcttagcaagtttggtttactccatttttactctacctttggtccttataattaatcaatatttttttgatattaaaataatagaaatatgtttattgataagttctgaattaatgttgttttatataatatattttgctatttatatattatttgatgaaaaattttttgatatcattatggcttatgtaatagttttagtatgtatacttacaacttttctagaaccactagtgatttttagtgttacacttccaatatttattgggttagcaatttttatgtattatagaataaatgacagtgtctctaagtcattgtttaaaacaaaagaaacaatattagatcatatcaatatgtacagtatattattatcaaacttcattttaaacaagttaataaatttgatatctaaatatattagaaattttaaatttatagctatattttctaaagatttaaatgaattacttaaatttgtccctaaactaatttttttgcacattgcattgttatttgtttcaccacaatataaattcattacaatacttttctatcaatttataattattaattttttaaaaaagatatataattcggatacaattttattagatttaaaattaatcccatatctcgaatattataaaattaaaatagtcattttatgcttatttaatttgattattcaaattacatttttgtattatcaagtattaagtaacataattataagtacagtaatgatttttgtatttgtttttattgcgatgatatgtagaaaaagatttaatcaaaataacatctaaatttataattgattaataaataaaaataggtacctatataatctgatggttgctaatttattagcaacttttttatatgataaaactctaatgacagtaatttttatttaataatacctcaattaaatgttgtaaatactatatgtattattaccgctttaagtaaaactaactagaatttatatacaattgaataaatagtaaatttgataaatatttatatattttttcagttattcacataaggggagcaataaattacataaatagttcagcagaacttgcacgcaaagaagaacagattggcaatggagagaagtccaattaaagatatggaaattaaggttttattaaagaacacattaacagataaaattgctgatcgagaagtatatatgaagggaattgatgctagttattattatgagagatataatatttataaggcagaaaacttaaaaagatagtgtattcttacctattcatgaaatatacactaaggttcaaaaatatatattaaactcattaaatcaaatgactaaatggattgactatctatttgtttttttatggaaaggattcatttttcgtgaattatatattgaaacaaataaatactgattttgaagatatagattatcaaataaacgtttaaaacaattagaaaagctaattcaagaaagagtaattttatttgcttagaaattggaacatattttagtgttatggtattttaaaataatgaattatggttgtaagaaataagttaaatataaaatatatagataatagaaagaattatgtaaatgatggtaaaacaaaagaacgatatagtaattatatgagtagtaataactgtatcgttctaatacttgttttgttatcttttatttctggtatacatgtaagtgattagatgttatttaaatagaagtgattttattttagattgttgttttttggtttagtataaaacgatgatataaaataaaaccaattaatgttgtgaatatttcggttaataggaaacataaccaaaaccaatctaatccaataagtgacaacaaatatcctaaaggtacgaataaaataatagttcttaggattgttaaacaagaactttttattgcttggccaatggcttgaaaaaacacaggaaaagtaagtgatgttacaagtggaataaaactcaagccaatcattctaaaagcatttttaccaatttttaaaaccacaggatcatggctaaagactgataacatctgtgttggaatacattcgaaaaataatgttcctataatcatcaaaaccataccaaaaagaattgataagtgtaatgtttttttacatctttcaatattcttacttgcccagttaaaactaagaataggaacaatacatgtttgcattgcatttaaaggaatgaagaagaatgattgccatttataatataatcctaatactgtaacagcttgatcactaaattgggatagaatcatatttaaaccgaagatgtaaaaagtataagtaatttgcatcaaaatattagcataacccatatgataaattctttttatataattcggaaaaatatttaattgaggaggacgataatatccttttttatatacaattgctgcagctaccatttgtccaataacagttgcaatagctgcacctgcaatacccattttaggcatatgaaacattccaaagattaatataggatctaaaacaatatttgtcagtgctcctagaatttgagcaatcattggtgttttcatatcacccttagcttgaataatttttgtccatatactctctaaaaacaaaccaaaactgaagacacagacaattcttccataaacaataacatcatgaataactgctgtagaagatgttgacattttagcgtaaataggcatgaaaaaccacatgatgattgtaaaaatcaaccataaaaagatagctaaaggtgttccaataccagcatactgaaaagcttcattatctttctctaaaccaaatttagaagccatgattgtattgatacctacacctgtaccaactgcaatagcaatcatcaacaactgaataggatataaaatggataacgctgttaaaccacttgctccattttttccaacaaaaagactatcaacgatgttgtataaagcttgaataagttgtgataacatcacaggtggcgcaagtttgattaaaattctagtaattttttcttttccaaaatattgattatctatttgttccatttctttgtacctcttttaattctgtaactaaagccttatggtaagttaataacatttgattcatttctttaaattgtgtgataccaatttgattagcagcatcaatttcatattgagttaatgaatccattaatggttgtaattcttgttttcctttttctgttaaaacatatgctttttgacgaccaacattcttctctttatcagttttaagtaaaccattattcatcatttgcttaatgacattgtgaatcgtctgacgaggaataaggtatcgatcactgatttctttttgaatacaatatccctgacttctcagcgtatatataactaatgtttcgttataactaattccatatactttagaccattgagaataaactccacgcaattgaataattgcaatattaaattgttcaataagttcaataatatccataacaacctccataatcccatatgggattataaaactctctttttctcaggtcaagaaaaaaatatatttaatgatcgtacatatataaaaattaatgaaaatatttttttacaagcaaagaaataataactgaaagttataagaactagagtttttggaatgttgcgggatagtttattttaatacatgtgtgtattttcaaaatattgattattatcgaaacagattatattagcaaaataaaaaactaacgataagacattttgtattattaataaaccatggtattgtcggattatcaattaggcataaaaatatcatcaaaagtatctgtttactaattaaaaatagttacaaaagaagaaataaacctacaaaaagatttagaaaaatgttgattgaaaaggtatgaacttagttgaatttaaatagaaaaaacggaacaaaacaaaaaaatagataaataatattttttatgagattacttttttgagactaggatgtgaaaaaatttttgggcaaatgtataatgacaggttagcagatgttgccatatatacaaatagaaaatgatatttgtaaattatacaatgaaaaaagattaagagcgttccatcacttgtctactcttaatcaagaaagaatatgtttaattcttacttttttctcgtgtatttttaaattgatttcgatattgttttggagaaagattagtatattttttaaatacttttgtaaaataactttgatctgtgaaattgagcatgatagcaatctctaatattgataatttagtgttctgtaataaaaatttactttcttcaattttttttctattaatatatgtcactaatgattcaccagttatttttttaaactgtacagaaatatatttagaatccatatttatttctttagcaatgtcatctagcttaatatttttatgtaaattttggttaatgtactcgatgcagtttcttgtccaaaaaggataagttgactttatatatttttttactaaagaacaaaagtcaataatactacgcataaatacttcatttaagcgatttagtgaatcggctgaatcaacttttcttatataaatgtcacttgtcccataagcatcttccaaaggaacattggttttgataacttgtcttgtcattaaagtgatggttgcaactattttatattttaaagattgtaattgattattagaaagaagttcagaattattctgaataagtttggctccataatttcgtgcagatatactatcaccagtttgaatatattttaaaaattttcgttcttcaagataagtatatatcttattattataatctcttttggtaataatgatttctttaacatcagtatctgattcactttgtttattttcatgtaagacttttctaatatcttcaatcataagagaatcatttgtcaaaaaatgatagactatttgaacataagaaaatgattgattatcaaaatttatacattttttataaacatcttctatcaagggtttacttttgaaaaagttgaaaaagacaatttcttttattgatttatattggtatatggattttaataacattggaccaaaacaaattgtataatttttgtaaaacataaaaaacataatatcacttttagtagatagtataccaatttttttccatctaataatagaagaattcaaaagatatttaaaacaatcttttggtaaagaaaaaaaattttgtggctgagcaataataattttattaggatctagtataaataaagggatatttgtaatttcataaaaattatcaatattttgaataaatgtttgaatcataatgttttaccacctctttattattttatcatctttaatgaaaacgaacaataatatttaccaaataacaataataaataccattttacatatattatagttttataataaaattgtaatcaatatgaaaggggaaaagaataatgtttgaaaaattacaagaaggattacaaaaagttgttaatccagttgcacaaaaattaagtaataatcagtctttaaaggctgtttcagctggatttgttaaattaatgcctattactttaggattaattattttctctattattggtaatttaccaataacaggttttactgattggttagcaaaaataggagttaaagaatctattgatgctgcattagttgccagtacaagtattatttctatttatgttgtatttgctattgcatataactttgcagttaatagaaaacaaagtggaattacttgtggctttattgcacttgcaggatttgttttacttatgccacaaagcgttactgtaggagaagaaacagttgctgctttacctatgaactatttagggtcttcaggtattgtattaggtttaattatttcattatgtgtaggtcatttatattgttttttatgtgaaaaaaatattacatttaagatgcctaattcagttccacctatggttactgagtctcttgaacctatttttgtagcaatgatcatttttgctttattgtttattgtacgtgtagggttctcatttacttcatttaaaaatgcggctgattttgtgtcacagattgttgcaaaaccattgttagcgattggaacatctataccagccttaatctttattctatttttaagtaatgtattttggtggtttggaattcatcctcaaacaatccaaggtccagtaagtagtgttttatatatgatgatgctagataatattgataaatttggtaatggtcaagaaatgttatatgttttacctttactcgtttatatgattgctggtgttgggggaaatggaaatacattaggactattgatttcaatgattactgctaaatcaaaacgttataaacaaatgtttaaattggcattagttcctcatatttttaatattaatgaacctcttatttttggtatgccaattatcttaaatccatttttctttataccaatgacagttaactgcattatttcaggtattattgcatggatttatttatcagttgtaccatttacatataatcctatgatggaattattgccttggacaacaccagtattcattaaatacttcttatcaggaggaattgctttatttatattagttgttattttggttgctgttaatacaattatctattatccattcttcaaaatggcagataaagttgctttagatgaagaattggtgggtgaataacatgagttttcctgaagattttttatggggtgcagcaacaagtgcttttcaatatgaaggagcaaatttggaagatggaaaaggttggacagttgccgatgaaagatgtcaagctaagagccaaatccaagctgacagttctgttgctagtgatggttatcatcatttagaagaagatgttaagttaatgaaagaattaggattaaaatcataccgtttttctatcagctgggcaaggatatttcccgatggagagggtgaaattaataatgctggtgtcatttattaccaaagattgattgatttattaaatgaaaatcatattgagcctattgtgacattattacattttgatataccttgggccttaattgaaaaatatgaaggttttgtatcacgaaaatgtattgatgcatttgaaaaatattgtcgcacatgctttgaattgtttggtgataaagttaaatactggttaacgatcaatgaacaaaatgttatggtaatgatggcagatatgttaggtttgaaaaaagatgatccaaaattaaatctaaaatttgtacaatgtaattatcatatgtatttagcaagtgcaaaagcagtcattgcctgtcatgaaatgtgtccagatgctttaattggtccttgtgtttcatatcctactttatatgcagaaacctgccatcctgatgatgttgcattagcatatgatatgcaagatataatggcttttgcaccaatggaaacatatgttaatggaacaattgatcctatagttatgaataaatggataaaagataaaacggtcccagaaattttagagaatgatgaaacaattctaaaagcgggggttgctgattatttaggcgttaattggtattgtacacagactattggtactacttcaaaaaacggtagttttaatattggagtagaaattgatataaagaaaaatccatttttagagtatggacattgggattggagttatgatcctaaagcattaaaaatggctttgaaagaatgttatgcacgttttaggaaaccaatcatgatttgtgaaaatggatggagtgaaattgaagaaatcagggatggcaagattcatgattcaaaacgtatcgaatatttgcatgatcatattgaacaaatggagaaagctattgatgaaggtgttaatttgataggttatcaacattggagttttattgatatattatcttcgtcacaagggtttgacaaaagatatggattgatatttgtagatcgtgataatttcaatattaaagaatgtcaaagaataaaaaaagatagtttttattattatcaaactattataaagaacaatggcttaggtgaagaaaatggaaaacagtaaattattagaattgtttcactcgttgagcttagaagaaaagatagggcaacttgttcagttaagttcagatttttttagtcagaatgttgcagtaaaaactggtccaatgagttctataggtattgatgaaagtaagatttcttatgtaggttctatattaaatgcatcaaatgtaaaagaaattaaaaagatacaaagcgaatatttaaagaaaagtaaacataagattccactactatttatgtcagatattattaatggttataaaacagtatttccaattccactagcattaggatgctcatttgattttcaattagtcaaagaaacagcacagattgcagctaaagaagcagcagtaagtggtatccatgtaactttttctcccatggtggatatggtccgtgatgctagatggggacgtgttatggaaacgtatagtgaagatacttatttaaataatcattatgcttcggtgatggtagaaggttatcagggaacaaacgattatcataataatattgcttcttgtgtgaaacactttgcaggatatggaggagttttagcaggaagggattataatactgtagaattatgtgaacgaacattaagagaagattatttacacgcatatcagtcagcaattaaagctgggtgtaaaatggttatgacttcatttaatacgattgatcgtattcctgtaacggctaataagcggatgttacgagatattttaagagatgaatggggatttgagggagtaactatttctgatcattcatcgattaaagaattaattaatcatggtgttgcaaaagacgaaagtgaagctgctaaaaaggcaatagaagcaggctgtgatatagatatgatgacagcatgttatgcaaatcatttatccaaacttgttgatgaaggaaaattagatatcaaatatatcgacgaggctgctttaagagttttaaaattaaaaaacgatttagggctatttgaaaatccatatcgtggcgctaatgaagatgatgcgaagaaattcatattggcaccagattttcgaaagaaagcacgcgaggcagtaagtaaatcttgtgttttattaaaaaatgataacaatattttaccattaaacaaagataccaaaatagctcttattggaccatatagtgatagtaaagaactttgtggaatgtggtcatttacagttgatacagatgaagttgttacaattaaagaaggtattcaatgttacaatagaaatataaaatcttgtatgggaagtcagatactcgataattatgatattgtagatgaattaaatcaattatttggaaaaaagagagtagatagctctttaattgatgattctgtagaattaaaaaaagctattcaatatgctcaagatgctgatattatcataatggcgattggtgaacatccttatcaaagtggagaagcggcttcaagagttgatctatctttaccagaaacacaaatgaatttattaagagaaatggcaaaatttgataaatcaattattacacttgtttttagtggtagaccattaatattaaatgaaatagaaaaatatagtgacgctattatacaatgctggtttccaggtatagaaggaggcaatggaattgcagatctactttttggtaaagtgaatccatcaggaagactttctatatcttttccataccatgtaggacaatgtccaatcttttataatcatctacctactggaagaccattgattcacaaagatgaaaacaatagatttatttctaaatatattgatgctccaaatgaaccattatattgttttggatatggcttatcatatagtaaatttagatattcatctatatctttaaattcgcatattatgaaggaagatgataatattgaagcttcaataacaattgaaaatatttccaatcgtgatggaattgaaactgtacaactttatctaagagatttggttggctcagtttcaagaccagtaaaagaattgaaaagtattcaaaaagtatttttaaaagctaatgaaaaaacaacagtaaaatttattgtcacgaatgatatgttaaaattttatagatatgatatgagttttgatagtgaagcaggagattttgagatatttataggtcatgatagttcaactgagaataaagaaatgtttaaacttataaaataaaaaatgctattataaagtgaaataggattaactttctcaaagaaaagttcactcttattcaaagaaggggataaactaggctaggtttattcccttaattattttaagagtttataatttggtataaatatagagtcgcatacaatctctatacttattagtaattggagattcaaataaaatagattttacgatttgggataacgttaatgctataattctttgattaagataggctatagaaattattgtatgaagaataaatataatgtgaaacaaagatatattatgatatattaatagtagaaatattatatagaaggaatgaattatatgaatcatcaaaaaaattcagttattgatatgacttttcttatatcaagtttattttgttgtttatacatatatcaattattcaaagctagatttttatccgtattatttattattccactgatagggtttggttactacttatacaaatatatacagtgtagaaatagagaacaggcttgggaggatattaagaaaaatcttcttatatttggcataatatgtataattttatcaggtatttcaaaatatacattagatacaattgaatttctatctggggcatatggttatacaaaaacagtagtactaaatatttctgattatacaaaaattgattattcaaaaaatatagataaaccccatataaaaagtatgatgattgcaaatagaaacctttatattgtgaaaagtactaatgaaaataaagtattaaaaataatagatgaaattgttgatttcaaagaaaaaccaaagttgggttataatacttatacagtaaagagttataaatatggagatatttggtttaagatacattataaaaatcattattgtcttgtggaaatacatgtttaatgaatgtgaggaaaaggatgaaaaagttaacaaaagaagaaaagaaattattaatgagaaaatggaaaacatctcaaaagaaagaatatcttttaagtaaagatgaagtcgaaaaattgtttatctatttagaatcacagttagaacagacaccatgtcaacatacacgtatgcatacaaaacaatggttgaaaaacaatcagccacaagataaaatagaagatattcttaatgaaatggaagaaatgggcggatattgtgattgtgaagtattattgaattgttatgaagattatgatattgaataaaaggagaacatatgaaactaaattatattacaattatggtaagagatattgaaaaatcaataacattttatcaagaactcgtaggactgaaaatagtaagaagatttaatccaggggctggagaaatagcgtttttatctcatggagaaagtgatacgatgttagaagtaatccaaattgatggaactgaaaaggtatcaacaaaagggatagtatttagctttgaagctaatgaagaattagaaattctaagagacaaagctattaagcagggatattctgttagtgaagttattgatcgtaaacctaaaccaaaacattttagagttatagatcctgatggattgacaattgagttttcagaaaaggaataaagaattatgaataatagttcttttttttattgaacatattgatatttatcgatatgtatgatagaatcatatcgaaggatatagatatgaggtgatggaatgaataaagactatgatacagaagcaaaaatatttaaagcattttgtgatcctaatagattaagaattttagatattttaaaaaatggagaacattgtgcatgtagattattagaaatcttagatgttagtcaatctacactttcacatcatatgaaaatactatctaatgctaatgttgttcatgtgagaaaagatggaaagtggtcacattactctctatcagaagaaggacttcaatatgcaattcaatatttacaaaaattaaaagaatattagtcgtctataagacgactaataaaaaatattataaatcgatgtatatcgatataaggaggaataatggaaaagataggtttattgatacaaaatcaaattttaggaatgaaatggcttaatcaacttattggatttattttaaatggtatagggataaaaggacaatggaaagaagtactccaattctttatctatgatacaataaaaatatttattttacttacaattttaatttatcttatttcttatattcaaagttacttcccgccagaaagaagtaaaaagattttaggcaaattcgatggatttttggcaaatttgataggggcattattaggaacagttacacccttttgtagttgctcatcgatacctatatttatcgggtttacaagtgcaggattacctttaggtgttactttttcatttttaatatcatcaccaatggttgatttaggttcacttgttttattgatgagtatctttggttggaaaattgcagtcgtttatgtaattgttggacttgttattgcaattgtaggaggaacgattatagaaaagcttcatatggaagatcaagtagctgaatttgttaaaaaagcgcaaaatgttgaaatacaagcaaccaagttaacctttaaagaaagaaatcaatatgcaaaagaacaagttattgaaacaataaagaaagttgctgtgtatattgttgttggggtaggaattggggcttttattcataactttataccagagcatattattgagtcagtgttaggtggaaataaattttactctgttccactggctacaatagtaggggttcctatgtatgcagatatctttggaacaattccagttgctgaaagtttactgattaaaggggctggactaggaaccgtattagcttttatgatggctgtgacgacgctttctttaccatcgattattatgttatcaaaggtcgtaaaaagaaagttaatgattgtatttattagtattgtaacaataggaattatttttgtaggatatgtatttaatattttctcgtttattttctagttaagaagggaaagtgattaatatggctactgttgttcattttaatatgttggtagaaatcaaccaattattaaaagataatggaattgaatattctattcattctattggagcgtgtacttgtgcagggttgagattaagacaagatggaaaatcttatccattgcaagaaataattgatttaataaatagatatcttgaaaataaatggatgaaagtcattcctaaagatgatgatccatcatatcttcaagttgtctcaaaatttgaatatgaaaaggagtaaaagatgaaaatatttcaaaaaaagaaaacatgttgttcatgtgagaaagattcattagaacaagctattgacttgcaaaaatcatcagcaagaataaaagtactagggtcaggatgtgcaaaatgtacagccctagaaaataatactaaagaagcattaaaattattaggtaagcaagaatctgttgaacatattacagactttgcccaaatagcaagttatggagttatgtcaacacctgccttggttgtagataatcaggtagtgacttttggtaaagtattaagttgtgatgagattaaagaaattttattgaaggttggattttaatatgaagaagaaaattgcctttgtatgtgtgcataattcctgtcgttctcaaattgctgaagcattaggaaaaaagcttctttcacaatattttgatttctactcatgtggtacacaattaaaacctcaaatcaatcaagatgctgtgagacttatcaaagatatatataacattgatatggaaaagactcaatatagtaaactcatgactgatatacctacaccagatatagtgatttcaatgggatgtcatgtaacttgtccttatattggtaaagactttgatgaaaattggggtttagaagatccaactggaaaaacagatgatgaatttgtaaaagttatcttaaaaatagaagaaaaagtaaaagaattagaaaagtataaatagcttttctttttctttataataaaaaagacttttaaagaaatttcatgtaaaataaaagaaaggaaaatatgaatcatttattgaaaagggagattattatgcaatataaacatattatttttgatttagatggaacattgatagatactgaagaagctattttaaagacatggcaaaatactttagaagaatatggttaccagtatacattagatgaaataaaagttgttttaggagttacaacacaaataggattagaacgcttaaatgcaaaagtagatgataattatgctcatcgttggcaagaaaactatgagaaatatgctatagaagctcaattttttgatggtactaaagtaatgttaaaagcacttaaagaaaaaggttgtattttaggaatagtttcatcaagaagttataaagaatatgaaaaatattttagtatgtttcatttagatgattattttacatataaagttttagaagaagatacagtgaaacataaaccagaagcagaacctttgcttaaatatatggaaattgctaaggctatgaaagatgaatgtatttatataggagatatgcctagtgatatccaatgtgcaaataatgcttttatggcatctggattagtcacatggaataaatcaggggttatttgtgatgaagcaaaatatatttttaataatccaacggatttattacagttataaaaaagaactataacatttatttgttacagctctttcattatattgtttattgtatagaaggtttatattgagacaaataagcagctagaagtataaaaaatgattgttcagtggatgaagaataaatattagaactatataagtatgaatttggagggaaagaaacgatttgtttgataggtaccgatagattatcttgcattgttaaaataacaattttatcttgatattctttcattatttttggatttatctgtgaaaatctttgttcaacccattcaccagttaaggaaataataaaacacatatcagtttcatgaatacaatcttcaataattgataaatcggcatttcgattaatttcataaacaataatatcaaaaggtcgcataacttcttcaaagaaattagctgttgcaaaaccatgcataccaacaataatacatacttttttagccattgataattgtttagcaattttatcaatttgcttatggtcatataataaatataaagaatcataaagattttttaaaccatttgttatcgtatcataatattcttttggagttgtatgatgattagaaatatattcaagattattattttgaaagaaagcatcagatttaatatttgtaaaaccattataacctattctcttacaaaatttagttacagaagaaggtgttgtatttgctaaataagcaatttcctcaattgtaatatcaggaaattcatataaacgatctaacataactttagcaataatgaaattaacatcaaacttctttatattaaataaatactcactcaatcttatttttaaagtaactttaatattttcattattcatatcaatcagctccttttatttattataatcaatatacatttttttgtatatataattgagaaaaagtattttccaaaactggaaaacgctttaaattgaaaaaaagattgctctcaaatataatgaaacacgtagataatcatgattataaaaaataaaaaaaggagagaataaaatgaacttttttacaagctttctggaacaaaaacttgtaccagttatgaataaaatttctaatcaacgtcatttaggggcaatcagagatggcttaattgcaacaattcctatgactattgtaggagcaattgcattattattagcaactctaccatggccagtatcttatgcagcattcattgctgacaatccaaagatttcaaatgttttaatacttatatttaacatgacattagggctattatcaatttatgtaagttttggtattggtaaaaaattagcagaatcttatggtcttgattcattatcaggtggtttaatagcaactctttcattcttaacaacaattggatttacaacattagatgaaggggcattcttagcaacatcatacttaggtggtgaaggaatgtttactgctattatcacatcattatttgcagtagagattatgcatttatgtgatcgatataatttaaaaataaaaatgcctgattcagtaccaaagaatgttggaagtagttttgattcattgattccaatttctatatcagttgtcattattgctattgttgttcatttctttggttttgatatcaataaagttatatctacagtaataacaccaattttaagttcatcatcagattccgttttctcaccaattatttatgttgtattaacaggattaatgtggtttgtgggtattcatcctgcagttttagcagcaattatgtcaccagtttggacagtcaatgcaacagctaatatggagatggctgccgctggattagcagcaactcataccggagtacaaccatttatctttacgtttttatggattggtggaggtggaggaacattagcgctatgcttatttatgtgtttctctaagagtaaatcacttaagagtttaggacgtttagctcttgttccaagtttctttaatattaatgaaccattattatttggattaccaattgttttaaatcctattctaattgttccatttattacggcaccattaatctgtacatttattacctactttgcatttactagtggaattgtcacaggaatggcttatccattagctgctccatggaattttccatcgttctttgctggtccaatctgtacaggagatttaacaggtttattcttagtcattgtaaatatgatagtaatgggacttgtttattatccattctttaaaatttatgaaaagaaaacattagctgatgaaggttttgttgaagggaaggagtaatgtaaaatgaaaaaaaatgtaaatagttttccaaaaaatttcttttggggtggagcagttgctgctaaccaattagaaggtgcttatcaagaaggtggtaaaggattatgtattgcagatattaatgaatttaaaggaaatttaccacctgaaaaaagatcaaataaagaattaagttctgttgaagtagaacaattattaaataaaaaagatggtgtttttccaaaacgttatggtattgatttttatcacacatataaagaagatattcaattattagctgaaatgggaattaattcttttagaacttcaattaactgggcaagaatatttcctaatggagatgatttacaaccaaatgaagaaggtttaaaattctatgatgatttatttgatgaattattaaaatatcaaattgaacccttaataacaatttcacattatgaaatgccattaaatattgctatgaaatatgatggttggtataatcgtcaaacaattgaaatgtttacaaaatattgtgaaactatctttaaaagatataaagataaagttaaatattggattcttgttaatcaaattaatttaattgaatttgaatcattcaatcatttaggaataccaagtgatcatgtagataatttaatggaagcaaaatatcaaggaattcataatgaattagtggcttgtggtagagctattaaaattggaaaagaaatcaatccagaattccaaattggagctatgacatattatgctaatgccttcccagaagttggaagttcagaaaatatgttagcagcacttaaacaaaatcaattacaatattattatacagatgtagaagtcagaggatatattccttcatatatgtatcgtttctatgaagataacaatttaaatatagaaatcacagatcaagatattgaagatttaaaaaatactgttgattttatttccttctcttactattacacaatgaatattaattcacaaggagaaacaattccaaattcacatattaatacaaagaatgaatggggatggggaattgatgctgttggattaagacttgctttaaatgaatattatgatagatatcaattaccaattatgattactgaaaacggaatgggattctatgaaaaaatcgatgaaaatggaaagattcatgataaatatagagaagcattctttagagcacatattgaacaaatgaaagaagctattcatgatggagttgaattaattggatattatccatggggaccaattgatttagtaagttgttcttcttcagaaatggaaaaacgttatggatttatttatgtagatcttgataataaccatcaaggtagtgctaaacgttatattaaagatagttattattggtataaaaaagttattgaaagtaatggtgaaaatttagaataaaagatttagctatcaatttaaggttgatagctattttatttgtgaaatgataggaagtatagtagaatatatccgaaatcataaagtgaggtaaagatatgaaaagaaattatcctaaagttatcatctcaaaagaaggtgaacaatggttagataaaggtcaaatgtggatgtatagaaataatcttgaaagtatggatgaggatattgaaaatggtgcattagtagatattgaaacaagacaaggacgttatttaggaacaggttttctttctaaaaatagtcatattacagtgcgtattctatctaaggatttaaatgatacttttgatcgtaatttttttaaacaaagaatccagtttgcctatcaatttcgtaagacattagaagccgataatattacaaattgtcgattgatctttggtgaagcagatcaattaccaggattaactgttgatagatataatgatattttagtaacacaaattagttcttatggtttagagatgattaaagatatgatttatgaattattactagaagttttaagtgaagatggacaagatgtcaaaggtatctatgaaagaaatgatattaaagtacgtagtaaagaaggacttccattagaaaaaggatattggaagaatgcacaattaccaaccaaaacagttattaatgaaaatgggttgaaattaaatgttgatgtggaaaatggacaaaagactggctatttcctagatcaaaaatcaaaccgtgtattattaagaaatatgtcccatggaaaaagagtattagattgttttagtcatactggtggttttgcattgaatgctgcatttggaaatgccagtgaagtagtggctgtagatgtatcacaaacagctcttgatcaaggttatgctaatgctaagttaaatcatttagaagataaaataacttttgtaaaagatgatgtctttgattatttagataaatgtgaagaaggtcgctttgatattattgttttagatccaccagcttttactaaatcaagaagaacaatagatcatgcatataatggttataaaaaaatcaatatgaaagcaatgaaactactaggacgaggtggttatcttataacatgtagctgttcacgttttatggaaacggataactttgaaaaaatgttaagagaatcagcacatgaagtcggagtaacactaaagcaggtatcagtcactcaacaaaatcatgatcatccgattctttggacgatggaagaaacatcatatttaaaattttatatttttcaaattatttaaaaccaaagtcttttgattttggttttatactcttaaagggggatattattatgttattaaaaacattagtagagaatacatcaatatcatcatcttttcaacataaacatggcatatgtttttatatagaagtagaaaatcataaaatattatttgatttaggacctaatgatttatttattgaaaatgctaagaaaatgaatgttgatttaaaacaaatagatactgtgattatttcacatggacatgtagatcatgcaggagcgttacaaagttttttaaaaatcaatcatcaagccaaaatatatgtacgggaaaatgcttttgaagaacatttcaataaattcttaggaattcaaaaaaatattggaattgaaccaaaattaaaaaatcatccacaaatcatactcactcaacaacaaacaataattaatgataatatgatattattttcaaatatcaaaacaaaagaattcttaccacaagcaaatctttctttatataaaaaagaaaataatcaatttgtattagatgatttcactcatgaacaaagtctgattatcaaagaaggaaagaaacgaattttaataagtggatgttctcatgcaggaattatcaatatcaaaaatgctgctgaaaatcttatcaaagagaagctaacccatgttattgggggatttcacttatataatcctgtatcccatagatatgaaaaacaagagtttattaatcagttagccaatcaacttaaacaacagccaatacaatattatacttgtcattgtacagggcaaaaagcttttgatatattaaataatcatttacagcaacaaatccattatttatccactggaagtatattagaattataaaattatttttgtgataactttatgttgtgaataatctggtttgatgtatactgatgataaaggtggggataaaatgaagaaattaacgaaatatttattagtatgtttgatgggtttgagtgttgtaggatgtagtgggaagaaagatcagttgtctattgaatgggaaaaagagaataaatttgctgatattgtttcttttcaaattgaatctatcagtaaaactagacaagtggaaccagatgttattggctctttctatacttattataagccagataaagcaacagatgtcttattagatgttacaatgcaaatgaagaatttaaagaaagaagatttaaaattatcaagtgaacttcaaggatcattgaaaattgatggtaaaagctatgttgttcgttttggggcagttagtgaaaatggaaagaccattagcaatggtggaacaattggagtagatgaagtgaaaaaagttcattgttatactgaaatagatacagcattaatgagtaaagaaatgacttttgaactaaaaacaaaggatgaagataatgaacaaacagctgctttatcttttcaatttgatgatgtgaatagtcattataaaacaaaaaacttaaaagaaacaattacttttgatggctctggagaagttacatttgaatcagttaaagaagctaagaaattagaaccatcaaaaccaacaggtatttatacttattttaaagttaaaaatgaaaacaagagctttgtgataattccagcaaaaattaaaaacaccacagatgtcgaaatacctgcatcaaacatagcaacagtaactttaattgatgcgaatcatctagaatatcgtgcaagtgtggtttatgaatatgataataaagaaaatttaactcaagcaagttcgattaatcttaaacctgggcaaagcgctacagtttattataagattgaagtgagtgaagaagttgcaaaaggtgaaaaatctttaagagttgatcatggtggtcaagtttatcttattaaactataaaaagtggcatttgccactttttttagttaaattctttttttaggatttctaagaaaacttctgctggtctagcaaatggctgatattttttccaaataaccaacattcctgcttctaattgaggatacaagggtttaaaacataaatcttttccctctatatttataatatctttaagacataaggcataaaaatgtccttcttctacaagtaatgatgcattatataataaattataggttccaacaatatttaattttctttgattaccaccaatccatccagccagttcattttttaccatagtttgattagaacaaagcaaaggcttatcacgtaaatcattaggagtaataatttcattattcgctaaaatactatgattagacatcaagattccccaagtattcatataaggtaacttcaaataatcatatttcttcaattcaacaggttcaatcacaatcgcaaaatctaaaattccatcttcaattttatgatacatttcatcagcattcccactatacaaatgaaacttcacatgtgggtacattaatgccatcttatcaatagccttagctatcaatctcattccatcactttcactacacccaatataaatatcacccgttaacaattcctcacttgccataatctctgattcagttctttctacaagactcgtaatttcttcagcacgcttccttaataatattcctgcttcagttaagctaatacgacgttttcctctgacaaataattgtttaccaagttcatcttctaaatctttcatttgtcttgataaagttggttgagtaatatgtaaaaaatctgctgcggcagaaatattttcttcacgggcaattgctaaaaaatattgcaaagttcttatctccatttatcgtcacctctatcattattatatttttaattgttatgccttacaagtataaaagaaaaactcatcttacaaataaatttattcagtatatgactattttttcctaaagaaaacgagtacaataaagatagaaagattttaaggaggacaaaaaatgttaaatgaagaaaaattaaaatcatttacacttaaaagttatgcaaaagatattgtaaaagttaatgatcatatttatttttttattggttatggtcatagtaatgcaattgctatcatagctcatcattctgttatattagttgatactttagatagtgatgttcgttcaaaaatcttattagaagatttaaagaaaataactgataaaccagttaaaacaattatttttactcatggacatcctgatcatagaggtggtgctgcaacttttaaagatacagtagaagaaattattgcttttgatagtatgaaaatgccaccaaaatactttgatagaattactccttttttaaatgaaagaggagaaaaacaatttggaatagccttaagtgatgaagaagccattagtcaaggaattggaattagagaaggacgtgcagtcaatgaagggacatatcaattcttaaaaccaacaacattatatcatgaagataaaattgaaagagatattgatggaattcatttagagttagtaagagctccaggggaatgtgatgatgaattatttatctatcttcctgatgataaagtgatgtgtgccggtgataattatgtgggatgtttcccaaatctatatgccattagaggaacaccttatcgtgatgtgacagtatggattgaaacactagaacgtatgttaacttatgacattgaatatttcttaccaggacatggacctcttttacaaactcaagcaaaaattaaagaagttattggaaactataaagatgcaattgaatcaattttatttcaaacattagactgtatgcgacaaggaatgacacttgatgaaactgtacaagctgttcatctagaggataagtatcaatctttggaatatttagaagaatattatggaacagtcgaatggagtgttaagagtatttataatggatatgttggttggtttgatggaaatgttaatcaattaatgccagtaagtttaaatgtttataataaaactttattagaattaattggtgaagataaacttattgaaaaagtaaagaatttaatgcaaaaagaagaatatcaattagccttacaattattagaattagttgatgattataaagatctgaaaaaagaatgtttacttaaccgtgcaaaacaaatgacttctgcaaatgcaagacattacttcatttgtgctgccaaagaattataaacgtacgaatcatcgtacgttttcagcaatatagggaggaatttatggcaaaattaagaaaaatgttaggcgatattcattgggatatatgccaagatttaatgcatctgatagaaactcaaagtcatcatacactcgcgagttgggctattcattatgcaaaagaaaattatctgccactatatctagaaagtgtaaaagaatcttgtctagaaaatgtgattgatgaatgtgaagaatatctcaatcagcaatgtcaattaaaagccatcaaaccattattaaaagctgctagagcagatgctaaaacattaacagaccctatcttagaagcattatctaaagccattgcaacagcatgtgcaactgtacaaacaccaaccaatgcattaggatttttattctatggggctgcagcgatagcttatcatgaagcaggattatctcaaacaaaagaagaatataatcaattagcttacacagaattacatcgagcttatgtttctttaaaagatgttgctgctaaagaagaacatcctgtgaaaataaattggaattgttaatatgaaaacatatgtcttagtggatattggtggaacatcaataaaatatggtttgattgatgaagaaatgaaatggctggataagcaagttatagatacccaagcgcaaaaaggtgctagccatattatgaataaggttaaaaatattgttagaaattatataaaagattattcattacaagcaatttgtatctcaacagcaggagttgttgatagtcaaaatggaataatcgttcatgcttcaaaaacaattcctgaatatacaggaaccaagattaaagaattatttgaaagtgaatttcatattgattgttatgtggaaaatgatgtcaattgtgctggttatgcagaaaaatgtggtggaagtggtcaagatagtcaaatcacggtttgtttaactgtaggtacgggaattggaggaagtcttattattgaccatcagctttataatgggacatctttctttgcgatggaagttggatatatgaatgttgatggacagtgttttgaagatattgcttctacgagtgccttagtgagaaaagtcacagcattaaaaaatgacggaacccattatgatggacgacgcattatcgctttaagtcaacaaaatgatatcatttgtcaacaagctattgatgaaatgtgcttagctttagcaaaaggtattgcaaatatttgttatataacaaatccggatacaattgttttaggtggtggattgatggaagaaaaagattatctttatcctatgattgatcattatcttaaagaactattgattccatatgtttatcaaaatcttaaattaaagtttgcatattataaaaatgatgcaggaatgataggggcatattttggttataaaaataggaggttattatgttagagcaaattaaaggaaaattagttgtatcatgtcaagcgttagatgatgaaccattacatagttcatttattatgggaagaatggcgttagctgcacaaatgggtggagctgcgggaattagagcacagtctaaagaagatattgatgaaatcatgaaagttgttgatttaccagtgataggtattgtcaaaagaacatatccagatagtgaaatctatatcacaccaacaaaaaaagaaattgacgaattacttacaacaaaatgtcaaatgattgctatagatgcaaccaatagaaaaagacctaacaatgaaaagctagaagatttagttcaatatattcatgctcataatcgtctagctatggctgattgttcaacttatgaagaatgtatgcatgctcaatcaataggttttgattgtgtttcaacaactctttgtggttatacaagctattcaaaattgttagatggtccacattatgaactaattgaaaaactagttaaagattgcaaagttccaattattgccgaaggtaaaattaatactccagaagatttaaaaaaagtttttgatttaggtgttcatagtgcagtggtcggaggcgctattacaagacctcaagatattactaaaaaatttgtaaaagttctaaataaataattttattcattattatagagtacaacaaatacttgtatatgatacattgtattgatgtacatgttctccttgctttcatttaaaatgaaaagaagaagtgataggagaaagaaaatgaataatagaataaaagaattaagagaaagagaaggattaagtcaaactcaacttgctgaaaaaattaatgcaagtcaacaatctataagtcagtgggaaaatcatttaaaagaagttcctatggatatagcagtcgcattatcggattattttcatgtaactattgactatcttatgtgtagaactaatcagtattgttatgatgataaacaattcagtgaacttaatcaagaaattgctcaattatctattcgtgatcaaagacttattaaaaccttaattaaatcaatgttagaagaaaataaaaaataataatatgacatcaaaaagactattaaagggatgatatctttaatagtttttaaattattgataaaaaagagctaatttcttacatatatatgaaaaaatagaaaaaattcattttaaataaaaaaaattatatataataaataaatagataaataagaaaaaagcaatgttgtgatgagtgtagcaatcattgaatatggatttatctagctgtgagaataaaaggagggacaagattcaaattcttaaaataattgatttataaatcaatagagaaaaatcccattaaaattagtgagaaggagaactatatggaattacatagtgatttattcattcaaaaagaacgctttaaaacaaaatatgataaacatgctgaagaagtttatatcttaaccgaaaatgagtcaggagctacacgtttaggtgatgatgttttatggactgttaatatgtcaatattggcatatgttgatattgaaacaggggagctttttaaggggaagaaaaccatgtcatggttatcttctgaggaagaacgtcgattagaagattatgggttaaatttaaaacctcaaacaatttatcgagtaaagataagaaaatcattaccatatgtcaataaatattcagaaactttatttgaatatggtgaatattttatgcttgatgaagtattagaaagagattgtcatcatctagagttagaagaaatattgaaagagtatcaaaaagaagtcattattcgacctgatggatgtcatgatttattattggataaagctttaggtttattttcaggaagtatgatttggaatggaaaagaatgcagtttacatcttgatgctgatgatgatgaagctataactgctgatgaagccattgacacattacaaaaattattgagtcatagccaagaatgggaagaaaaaattcgtttatatgcagctgaatatcttactgatatagctaatgattggagtgaagatattaaagtagagctgtctgtagaagaatttaataaacggatgagacttgataatattagtgttatgacagaaggtgattttgaatttttctttaatgatgatggtatgataggtggacatgatattgttgtaagtggaaatattgataaaggattggatgatgcgaatataatagggtaatgattaaaagaacgagatgaatcgttcttttttctttttaaatctaaagtcacttgcgacattttagcacacattatataatgagattattcaaggagatgtgtatatgattaaagaaattgttaaagatcaatttatattaggacaaaaatcaaaagaagtaacattagaagatttaccaatcgctttagatttattagatacaattaaagctcatgaagaaaattgtgtgggtattgcggcaaatatgattggtgagttaaaaagaattgttgtcattaatgatcacaatcattatataattatgatgaatccacgtattttaaaaacagctggacgttattatgaaacagaagaaggttgtttaagtcatgaaggagtaaagaaagttaaaagatatgaaaaagtaaaagttgaatatcgtgatgaaaattggaaaataaaaattaaaacatttcaagattttgctgctcaaattgtacaacatgaaattgaccattgtgagggaatcttgatttaaagaaaaggaagatgtaaatgaagttcatcaatagattaaaaaatattggaccaggggcattagtcgctgcggcctttattgggccaggaacaattactgtttgttcaagctcgggagctagctatggctacactcttttatgggttattttgttttctaccatagcaacgattatgtttcaggaaatggcggccagattaggaattgtgactggtaaaggattgggtgagaatattagggaaagaattgatcatccgattttaaaaatagttattatgcttattgttgtattggcaatatttgttggtaatattgcttatgaaacagggaatttaaccggtggagcaatggggctatcaacattattacctcacgttcctctaagaacaattgctttagtgatgggacttgttgcgattgttttgctttatagtggaagttataaatatattgagaagtttatgacggcattggtatttattatggcatttgcttttattgtgacgatgattttatcaaagccagatttaattgctgttatgaaaggatttatacctagtttttatcaggttgattggatgagtgttgttggtttgattggaacaacagtggttccatataacttatttttacattcatcaagcgctgctcaacgttggaaaaataaagaagatattaaagatgcaagaatagatacagttttatcaattggtttaggtggaattgtttcaatgtgtattgtgattgtagcagcaacgaattgtggtgggttacaaattcaaagtggtggagatttagcaatggcattacaaccggttttaggaaatggagcgactgttttagtaagtattggtttgtttgcagcagggctcacttcaacaataacggcgccacttgcaactgcctatgctactagtggaatcttagggatttctcaagatatgaaaacaaagaaatttcaaatcatatggttgattgttattgtgagtggaatgatttttcttgctttcaatcattcttcaccaactcaattaatcttgatagcgcaaggagctaatgcaattattttaccaattatggctattttcttaatgatttgtatgaatgatgaaaaattagaagaatacaaaaatggtaaacttaataatataatgggatttattgttttaggagtgactattttaatttgtattagaaatattatgagtatgatggggtaattatgatgggagctattttatcagaggaaatattaaaacaataccaggatttatgtcaaaaagctgatttgtttttagaacagcatcaggcaaatgaagctattgaagaatatcaaaaagccttagctgtgttaccagaaggaatttggtcttgttcaagttatgcttatacaggaattggagaagcatatcagttattaaacgactatcatcatgcattagaagcttttataaattcatatttggatgaccaacaattcaatccttatattttaataaatataggaatatgttatgaagaaattggtgatcataaaagaggcctttattttcttaaaaaggcatatgatattgatcaaagagtttttgaaggtttagataagtataaaaacatgttataaagttcataacatgtttttttgttgataaaatcgatataatttttatgtcgtaatttgtataataaagatggcttaaggaaataacaaggtttcaaaagcaataattgtttcaccatagaaagtatttacatgatttaagtcatgtgagaaagaatcatattgaccaattaagatgggtaatgatgaattcttatagataggggaatcagaatttgcaatgaaactaatgataggaacatgattctgataagctgtttctacaatttcatttagacgtggtgtttttcctgaatatgaaacaacaatcataattgtatctttgttaaagagctgactaaacatttccatatgaacaacacacattgcttgataaccaagtaaagttaaacgttgttgcatatattcagcaacaggtgaagaaaaacctaaaccaaaaacaatgaaacgttttgattgatcattcagtaatgatgaaaattgtgtttgatattcatgatatttatgatgaaagtcgatgtttgtatctttggtagatgtcaggtgataaatcatatcactataaccttcaaatccaaatttattacataatttataaatggttgaagtacttgtatagttatcttttgccatttgacgtataccaatagactttaactcattgatattttcttgcatataagcaacaatttgtttttctaaatcattgagttcatatttttctgataaatgcacaatattcataaaaaacacctcctaaatcaattatgtcatagaaaaaagaaaggggcaagacaaatatggcaaaaacaatgtatgacccatggtcaaaaatcaccacaagaaatggatatgctggtgatgaagttatttcagcattacaaaaatcaattcgtagaggattagaagaacaagcatgtatgttcgcttatgaactttatgtatcttcacctcaattagaagaaaaattatggagaagattattaacaatctcagttgaagatattggaatgggaaatccaatggcagcagttgttgtgaataatttatatcgtatgagtagagaatttgattatgctgatggcgatagaccaatctatttcattcacgcaattcgttatatgtgtcaatctgaaaaagatcgttcaagtgatttattaaagaacatttgtattaaatctttcgcaatgggaaaattccctgaagttccagattatgctttagataagcatacacaaagaggacaagcaatgggtagagattcattccatttcttaaatgaagcaagtaaagttattccacaaaaagaaattgataatgattataaagaaagatatgcaaaaatcttagaagaatatgatccagaaaatgttgtcgattcagcatttcaatttaatggatggcaattttaatataggggagagaaatcatgagtaaattagagaaattattagctccattagcaaataaacttggaaatcaaagacatttacaagctatttctaatgggatgatgatgtcacttgcattaattgttgtaggttctattttcttaattgttgcgaacccaccaattaatctagatttagttgatttaaatacaggaaatattttcttaaaagctttaattggctggaaacaatgggcagttgcaaattatgatgttattacaattccatatacaatgacaatgggattgattggtttagttactgcatttggagtgagttattctttagctgaaggctataaaatgaaatctgcaatcaatggaattattgcaatgtgtgtattcttaatgattgctgcaccagttaaagaaggtcaattatcaatggcttatttaggtgcagatggtttatttgttgctttaattgttggtttattatcagttgaaatttgtcgttttgtaggagatagagttatctttactttccctgatagtgtaccaagcgcagttacaaacttcgtaaactcattattaccacttgctgcgaatattatcatcatttatggtttaaatttagtagttatggcaatgtctggaaaagctttaccagaattaattatgagtttattaacaccagctatttctggggttgataatatttgggcatatatggcaatctttgctttctcaaatattttatggttatttggaatcaatggttcatctattattttcccaattgtctttactttaggtttaacaaattcaggattaaatgcagaattagttaacgctggacaaagtgcaagtcatattatgaacttacaaatgtatcgttatgcagtattaggtgggggtggaaacactttaggattagtcttattaatgtgtttctcacatgtaaaacatttaagatcaattggacgtttaagtgttgttccaggaatttgtggaattaatgaaccagttatctttggtggaccaattgtgttaaatccaatcttagcaattccatttgtattaatgccttgtatttctattggtctaggatatttagctcaaagtattggattagtaagtatgggatatattattgatccatcatttactccattctttgcacaaggattcttatcggcattggattttagaaatgttatctttatgtgtgtattgattgctattagtgtggcagtttattatccattctttaaagtttatgaaaaatcattagctgaaaaagaaggcgtagaagcttaagtctattcatttgaatagactttttcttttgacttgggtatacttaaatcaggtgatataatggataaattcgaaacattaaaacaagagatattaacatgtcaggcatgtcgtgatattttagcttataagcctcgtccggtttttcaaggacaacaaaattcaaaaatcatgcaaatcagtcaagcaccatcacgtaaagttatggagacaggtttgccatttaatgatcctagtggtgaaaaattaagaaatgattggtatcaaatcacaagcgaagaattttatgattccaataacttttatatcacatcaattggtcgttgttttcctggtaaagcaaaaaccggggataatcctccaccaattcaatgtgcgcaacgtttcttatcaagagaattagaacttgttcaacccgaaatctatattttaattggtgctcatgctgcaaagttcttctatcctcaagaatcattagaagatttaatctttcatgatcatatttatagaggtaaacctttatttgtcttaccacatccttcacccttaaatcgaaagtggttaaaagatcacccagaatttgaaaaagaaagaatagtctacattagaaaaataatccataaatgcttaaaacaaccagaataactggttgttttaaaaaggggagcttatatgattcatttaaacaatttttctaatataatttgccttctttcctttgaacatgttttttcatatctcaaagaatcaacattcattgtaattaattcacttttagaaaaatgaatataactcattttcttatctataaaatcaaaacaataaagtctagtaatcgcattaatatagatatatctaaaaaataaataagtataaggaagattaataaaataacgatacaattcatcttcttttaaattatgacaatgagaaaatatatacaaaccattctctttataaacatcataatttctacttttttcaatctttctttctatcgcattatctaatttttcaaatacaaaagacttatctttatgattatgatcaaaaggtgtcatatcaatcgaagcatataatggctttttgatatcagctactgcttcctcaggagttaaagcttgtgtgacttcaatacctaaattaagcgtatataaacgcaaatcaggccgatcatcatgaaaaatatcactctctttgatatggagaaaacgtgctaaggttaaagcagcatatttctcaaagtaatttttactataactttcacgcatctttcatatcacttccttgaatcattcatttttttataatatattcttttttcttgatacatttttgaatcagctttctctattaattgatgaatagaagtatttgaatcactccaaacactaccaatagacacactaatatatttatgttgatgatagttttcttgcattttttctacctgattcataaaatctttttgtttcatatgtggacaaataacaataaattcatcaccaccaatacgataagcctgattataaaaataatgattcaaaatatgtccaacatctctaattaactgatcaccataacgatgcccataatgatcattaaatttcttaagtccatcaatatcaatatatataataccaagactagaaaactcctgattatcaaacatctctaaatccttaatatatttattacgattaaacaaaccagttaataaatcagtataacttaaatattccaattgactcatcatttttcttttttgtatatcattcacaacaaaatatgtaatagaagtcaataaatctagatcatcattatgaaaagtaggatcatctacaccaataaaaccagcaatctgactatcttcaattaaaggtgccattagtgattgatatgctgtaatatgtgaagataaaaaatttaaacatttggtttttttatattctgcaagtttttcattaatgactgataaaggaatattttgtaataaggaaatatgaggagtaacttcttcattgcaccattcataagtgttacttgcttgttttttgagtaaatcatattcaaaaatgtaaacacgatgtgctccataaaattcagcaattaaagataatattttatttatcgcattataaaaatcattattttcagctaatgtctgaatacaatgaataagcgtttcctcactcgttactttagtgtgtaattgttgtttttcttgaacttctttagtaatatcaatcgcaatttctaatcttaatattctttcatcctttgtttgaattagtttatctctaacattatagtatttatttacaaagtcattatatcgatcccaggtataaaactgattgagagttaaatatttgtttgtacaaaactcacaaggataatctttgccttgtaaaagtttataacacttttgacctttatattcattatcatcttgaatatgataaatatcttttaataattgatttaaataaacaatttcataggtaacaggatcagaaagataaacaacattctctgtttcttttaatataatttcacgaaactcatcaaaatcagtcataatatcatccctatctctatgtttattgtaggataaatcatacaaaaaagaaagcaataacgatatataaaataaaattgttaagttgatgatttttaaaagataatgatatttatggtataatatctttatatttgtaaaaaatgactgttatgagttatagaatagatattttttaaggaggttaaatatgtgtgggagatattattttgatggggatacctatcgtttcgttggtagagtgattgaagattgtcagtatgactatgaagaatatgaaaatgatttttatccaggagataatattcctgtattagcagttaagaatgggaaattgacattgactcctatgaaatggggatattcaatgaataatagttctaaacgagtgataaatgcaagatgtgaaacagtattagaaaagaaaatattttctcaagatgctttaacacatcgttgtcttattcccgctaagggattttatgaatgggatagtcataaacataaggtttcttttgaatcacaaaaaaacagatatttattgatggcaggtatttatcgcgttaaagaaaatgaagtgacaattattacaacaatggctaattctttaatgaaacctattcactcaagaatgccattaatgattgatgaacaagatatacaaagatggttatatgataatcaatatttagaaagttttttaacttctacaactgatgatctaaatattgtttctgaacaaatacaagagtcattatttggtgatgatgaataaactataatggtgatgtttatggctttacctaatatgaatcctttagttattgatcaattgatagttgttatgagtagtgtttttatggattgttttagtgcggatgaacaagatgtaattgggaacttttttgcaactttagggagtatgctatctttaaatagttcatatatattattacaacaatcacaaaatgaaatattgaatcaagatgataagactgaggcggattcccaatatgatttattagaaaaaagtattgataaaatgaaagaagaaattgagaaaatgaaaaataataagcattaaatttgctttttagtcattatttttctatcataacaacaaggagtgtgaaagatatgttagaagtaggtatgaaagcaccagattttacattattaaatcaaaatggagaagaagtttctttaaaggattatcgtggaaagaaagtaatcttatatttttatcctaaagataatactccaggatgtacaaaacaagcttgtggctttgctgaaaattatccacattttcaagaaaaaggcgctattgtgttaggcgttagtaaagatagtgtgaaatcacataagaaatttgaagaaaaatataatcttccttttactattttatcagatccacagttagaagctattcaagcttatgatgtatggaaagaaaagaatatgtatggtaaaaaagtaatgggagttgtgagaacaacttatcttattaatgaagaagggattattgaaaaggcttttggtaaagtaaaggctgctgataatccattacagatgttaaatgaattataggccgaaaggtctttttcttttggttcatttgttatatactatggacattgaggtgaagttatgattaagttaattgcgacagatatggatggaacatttttagattctcataaacaatttgataaagaatttattgatgttttttatcagatgaaagaaaaagatattaaatttgtagttgctagtgggaatcaatactatcgtttatatcaaaggtttttacctttaagtgaacatatgtattttgtggctgaaaatggaagttatatagctaaaggaacaactgaattgtattgtaatattatatcaaaagaagatgtagagagaattaaagagattttatctaaagaagatagaatatttatggttttgtgtggaagaaaaggagcctatattttaaaggagcattttgaatatcgttttgaaatcaaaaaatattattgtgcctatacttttattgattcttttgatgatattgatgatgatattatgaagattgctatttatgataaagaacatcatattaatattgtattggatgatataaaagatcagttacctaaagatgttaaggttgtaacttcaggtaatgagtggatggatattcaaaataatgatattcataaaggaattgggattcaatttttacaaatgttatatgatattgcgccagaagaatgtatggcatttggtgatcaaatgaatgattatgaaatgcttcaacaagtaaaatatggttatgctatgagtaacgcggttgaaccaattaaacatgttgcttatgatgttattggttctaatgatgagcaaagtgtcattagtaaaataaaagaggttatagagggagattaagatatgggtgagttaaaggttgttgctatggatatggatggaacgttactaactgcaagtcaagatattttaccctatacaagaaaagtgttgatgcaattacaacaacaaggggtatctttacttttggctagtgggagagatattgatagtttacaaaaaattggacagaaattaaatttatctgattatcctcaaagtggatatatttgtctcaatggattagaaatttatgattcacttggaaatcaacttcatcaagaagaaaaacttcaatttaaagatgctgctattttagctgatatggcaaagactcatcatattgatatgattctgttttttaagaatagtctttatattatggattttggtcaaacaggcataacagaacatcactttatgacttcaactaaatataaagttcaagacattaaagaaattcctttgtttgagtttgaagatctaagaaaagttgcgtttgttcaaaaggcatctattttaaatgaaatattaccaacattacaacaaactgctcatcaacaatttgatttatgtaaagttgaacctgattgggtagaaatcaatccttatggttcacataaaggagcagctttacaaaagtatgcaagtataaaaaatatttccattgatcatattattgcatttggcaatggtgaaaatgatatagaaatgttaaaaatagctggtaaaggtattgcgatgggaaattcgtttgaaaatgtaaaatatgttgctgatgatatatgtgaagataatgaacatgaaggaattggactatatttacaagagtatctaaaaaagcagatttcagaataaactgaagtctgtttttttaaacaatcccaatccttaaaataatacttctgatataattaaagaaattgttcctaaagcaataaatactaaagcaacaccaacacgttttttataagaatccattttttgctgatcttctaaagacattatagaaggataatttcttcttcccaataaataaagaataaggttgctactattacgtcccattgtaaacaatccccaaaaatgaggatgtttaaaatgacgacttttggcatcaataatagttatacgaaaaacagaataactgagttgaaaagctccaagtaaaacaataaaaacaaataaaatttcataatatttcatgtgtatacccccctaaaatttacggataatctgataaaagaaaatcgtgatactgataattgaaagacttaaaatactagctaataaaatcttgttttcagaaattatttgattaaaaataatcataaaaataaaaacaacaatatttaataaacccattataattaattttttattactattcacaatattcgtactttcatttaaatgttcaatcatatccttatctccttttaataaaacatccaaactcatctgataaagatcactcaataaaataacacttataatatcaggataagaacgattattttcccaatttgatattgtctgccttgaaacatgtatttcatcagcaacttcttcttgggttaaacccttttgatttctagcatctcttagtttctcaccaatcttcataaaacccctcctcgtttctcttatctttccatattcttgtatttttgtctatcaaaagtctttgacattacccaattaatgatgtaaaaagtgttttattattaaaaaaagacacgtatttgtgtctattgccatttctgataaagtttttcaactaattgacaagcttgaattgttttttctttattcataacaggactttcaatgagacctttatttaaacaatcatgaatgtgttttatttcgtaaacaaattcactttgataaggataatagaagtattgtgtttcttgaccatgaatatgaagttctaatcctttagatttccaaaaataaggaacaataatataacctaattcaccataaaaaacagcttcattttttaattcgacattcattgctattgtagatgaaacaagaatctcatgatttacttttaattgaaaattacaaatttcatcagctttagtagaacattttatacatgtaccatcgatatctaaatcaggctgatcaaacaaatattgtaatgattcaattgtataagtcgcactaccatacaatgcgccaccacctaatgttaaatcatacatccaatgatcataatcaaaacgaccagggaagcctgctttatattcaatatatttcacttttccaataatgttgttattgatgagttctttaactttctttgttgtaggtaaaaatacacatttttgtgcttccattaaaaaacagttctgttttttagctaattcaaataattcaatagcttctaaactatgtaatacaaatggtttttccatcaccacatgtttatgatgtaataaggcttttcgacaatcacgataatgtaatccattgactgttggaatatagattacatcaatattgtcatcttcaaacaattcatcataacttccataataattatcaatatttaatctctctgcagcaatttttgctttttctaaggaacgtgatgcaatagcttgaacatagccatctccactttcacgaatccctgcaacaaaacgatcaacaattgaagctgtacttaatataccataacgtatcatatttatcacccactccattataacataaaaagttacttttcatttgacaaatcttattttatagtttaaaatgaacgatgttcagtttggcggtgataagatgaataaaattgtaacttcaaaagaaaatatcttaaaggctagtcgtgaaatagcttctaaggatggtttacaatcaatcaatatgcgaaatgttgcaaaacattgtggtgttgcagtaggttcgatttataattattttccttcaaaggctgatttaattattgcgacagttgaagatatttggaaatcattttttcatatgggtgatgacttatactttaagcactttaatgattgtgttgactggttatttacaacaattcaacgaggcacgaagcaatatccaggattctttattgctcatgcacagggttttcaatcttctgatgtgaaacaaggtagagaagtcatggaagaatattttaaacatattcaaagaagtttgttgatggttttaaatcaagatcaacgagtgaagcaagatgtttttaatgatgattatacaaaagaagattttattcaatttgtatttgtgaatataatgaatttattatcacaacaacaaccatcttgtcatatcttactagagacaatacaaagagttatttattaacccacttaggctgtgggtttatttatgaattaaaatgaacgatgttcattatggagggcgatatgaaagtacaaaagaaaaatctattaattttagcaggtatagtatggtctattgcaggttttaatatcttaaaaatagggattgaagcctatgtatcatatgtaagtttgcttaatttagtgttgtcattggttatttatataatttttatgaagtttgttttttctaagatggttaataaacatactaaaagaattgtttcttatgaagaagaattacaactctttattaagttttttgatcaacaagctttttgtattatggcatttatgatgagtgtaggtgttagtttaagagtttttcacctcgttccagaaatatttattgccgtgttttatagtggacttggtggagcgttactttgtgctggcatattgttttttatcagtttttatcaaaatataaaggaggaagtttaaatgcaagcaattatggaaactggttttgatattatttatttagcaacggttatcacgttaggaattttgatgattaaaggaaatcgtgggaatcgtcaatacttactgtttggaattatggcagttactttgggattaggtgattcatttcatctagttcctcgtgctattgctttatgtacaacaggattgcaagattacactgtcgctttaggtattgggaagtggattacttccataacgatgacaattttctatgtgattttatattatgtttggcgattacgttatcatgtagagggtaaaaatgaattaacaattgttatgtatattttagcagcactacgaattgctttatgtatgttcccacaaaatgcatggacaagtgtgaatgcaccattgtcttgggggatttatcgtaatattccttttgcattaatgggattaatggttattattttattttatcaaagtagtcgacaaaaacaagataaagcattctataacatgtggttaactattgttttaagttttgctttctatattccagttgttttatttgctgatactattccaatggtaggaatgttaatgattccaaaaacttgtgcatatgtgtggacagtttggttaggttatagtgatatgagaaaagttcaaggataaatatatttgtgtgaaattatgtgaagtagaaaataaaaaagaaatttgccctcttactctcgtatatagaagtaggagggcttttttatgataatgaaaagaaagaaaattgttgattttaaaaatgatgttttgttcaagtataccttgagagatgatcaggaccctgattctatctatctccttaaactcatcattgaaaacatcgctggcattgactgccattcactcaaggtcttgaatcccgatctcaatcctcagcatgtcgaagacaaggatatgattctggatatcagagtcaccaatgaagatggtgaaatctgtgatgtcgagatgcagaattcatcacttgaccaggagcagtatcaaaggttccagatctatggagcaagactactcgtagaacagcaaaagagaggagatgactatgtcaccaacattcatcatgtgtttcagctgatattcatcgatgacctggataaggacaatctggtactgatagacaggtatatcagtcagaatgaatcaggaaaccaggagaaacataacttgatcacgagaatctacatatatctaccctatatcaatatcctaaagaaggaaaagggattagagaacttcaatgaactagaaacagcgatctacatatttaaaaatggaatcgatgatgatataatgaagttaaagaagaaggtggtggatatcatggagaagaaggcagatgattttaatgaagatatgattctacaggatatggcattcaaccgtgatttaaacaagcgagcaagacaggcaagaatgaaaagagaacgtgatgaaggaaaagaagaaggattagctgaaggaaagaaacttggattgaccgaaggaaaaaagcttgggctgtctgaaggaaaaaagcttggactgtctgaagggaaaaagcttggattgaatgatggattaagatattctgtattaaaattgtttatcaagacatatccacaagctgaaacaggatttctggaaaacctatccgtagagcagtatgaaaagatatttgacttacttattgaaaaagcaagtctagataagatatatgaagctgcagattgtataaaagagtaagcttagaataaaaaggaagttttagtaatagagacttcctttttcatatcttgatatttttatgattataaaatgttttttttatataataaatgaaggaggaaaagatatggataaaaaaatagttttttttgatattgatggaacacttgtcaatgtacctcatgggctgatgcatcctactcaaaagacaaaagatgcattaatagaatttaaaaaacaagggcataagattgttattgcaacagcgcgaggtgaagttccacaaagtgtgaaagatattgaatttgatggatatatttgcaatgatggacattatattcgttttgataatgtcgtacttatagatgatattatgagtacaacacaaattcaaaaacaaatggatgtatacaagaaatataatgggcgctctatgtataatggacatgatggtgaatggtgtgcatttctagatgatgaattaataattaagcatcgtgaaatgtttcaaggtacttcgaaaagaccaataggagtaatagaaaactttacagcacaagatgtgaaagctataagctgttgtgttttatttgaaaatgctgatgatttatggaatgcataccatgaattggaagatgagtttactatgattccttatgcaacaggacttattcgtatggatgtttataataagggatttactaaaggaactgcatgtgcttatctttatcaaaagttaggtattgattatgaaaatacttatgcgtttggggatggagttaatgatatagagatgtttcaattggttaaacatggtatagctatgggaaatgcagttcaggaactaaaaaatatagcaagtgatataacaaagagtgtagatgacgatgggatagctgctgcttttgttaaacactttcagataggagaatagaaatatggcaaccatacaagttaactttttttctcaatcattaatgcgtacagttacatttcaagcgattttaccagttgataaagttttaaaatgtcagcaaaaaatcaaaccatataaaaccctttatctattacatggtatttttggtgaccaaacagattggttagtggggacacgtattcaaagatgggcacaagaccataatttagctgttattatgcctgctggtgaaaataaattttatgtagataatgaaaactcacatgaatatttttcaaagtttattggtgaagaacttgttgagatgacacgtcgcatgtttccattatcaaagaaacgagaagatacttttatagcgggattatcaatgggaggatatggagcgatcattaatggtttgaaatatcatgaaacatttggatatgtagctgggttatcttcagcacttatattaaatatggttattcattctactgatggagatgatattccttatatgaataagcgtagttatttaacaagtgtatttgggaatattaatcatttacgaggaagtgacaaagattataaagccttagtattcaagttaaaaaaagaaaaagctaattttccacaaatttatatggcttgtggtacagaagattttctattaaaagcaaatcaagactattatgaatttctaataaaagaaggaattgaggttacttacgaagaagggccaggatcgcatacttgggatttttgggatagatatatacaaaaagtattagaatggttaccacttgataatcaagaagaaggattaagtagtggacatgttgattaaattatataagaatgtctaaaagtctttagacatataagaaaattgtttataatggataagagagagtgataaaaatgaaagcaattataggaataacatgtagtgaaaaatatgaagaaggacgttgtattcaatttgttaatcaagaatatattgaagcaatagaaaaggcaggtgggatacctttactattaccaatatcagaatcaaaagaagtcgtagaagaacaattagaaagaatagatggattattaatacctgggggttatgatgttaatccattattttatcatgaaagctgtcaatttgaattagatatttctgattcaaaaagagactattatgaaatacaattattaaaacaatgttcccaaaagaacataccaatcctaggaatatgcagaggtttacaaatcatcaatgttgcttttggaggaactttatatcaagataatcaaatggctagtgaatatgtatttcaacatcaacaaaaagaaagacgagaatttccaacacatagtataagaattaataaagattcatttctagcaccaatatttaatgataaaacatttgttaatagtatgcatcatcaatctataaaaaaattagcagaagattttagagttgttgcaagaagtgaagatagtattattgaagctattcaacataatttcttaaaaatctatggtgttcaatttcatccagaatgtatgattagagatgaaaaaatgcaaaaaatatttgatatttttgtttatcaatgtaattacaagaagtaaagctaataaatattggctttatttttttgttaaaataaattattagccgtattttgtttcataaaaggaaagattttcttgaataaaaaagataaaatagattacgaaataaatgaagttcattaaaccttgtttcttgccaaactgtacagacatcattcaatctacacaaatctctatttctaaatgattttaataacttaatgatactcttgaggattgataggttgtttattaaaaaattaaaatgcttgtttcgttaaaaattcttgatgatttatttgaatcaactattttaaaaataaaaattagaaatgattacctttaactcattacaagttaccattaagctatttttttaaagagtttatcttggctttattgatatgctttggtccatgctaggatttcacatgaggtaagtcagtagctttatattataatgtagaagcgacggatttcaaaaaaatatattaggcacgagaatgtgcacataagaggaggttttattatgcaagaatatcataatccagttattaaaggatttcaccctgatcctagtatatgtaaaaaaggaaaagatttttatttagtaacaagttcttttgaatatttaccagcggttccattatttcatagtcgaaacttagtagattggcaacagataggtcattgtctaacaagagattcacaaatagatatacataaaacacctaatagtggtggaatctttgccccaacaattcgttatcatgaaggtattttttatcttataactacaaatatttcgaaaggtaattttattgttcgaactaatgatttaacacaaggattttctgaacctatatggcttgatataaaaggaattgatccttctttatattttgaaaataataaagtctatgtccaaaatgcatgttttgatcaacaaggaagctttattcaacaatgtgaaatagatataaatacaggcacaatcataaatgggcctattgaaataagcagaggatgtggtgggagagatgtagaagcaccacacatatataagcacaatggttggtattatttattttgtgcagaaggaggaacacgtgaagggcatatggttactatacagagaagccataatctttatggtccgtttgaaaaatgtcctgataatcctattgtttctcaacgtgattatggaaaagctttattacaatcagttggtcatgctgacttagtagaagataatgataataattggtggattgttgctttagcaacacgtccttataaacatcgtcatcatttgggacgagaaacgattttattaccagttacatggagtaaagatggttggccaatggtggaaggaaaacaagcaaaagattcttataaaattcaaataaaagaacctatttatcaaccaaaaaagataatccatgatacttttaaaaaaacaaaattggattatgaatataatacaatcagaagctttttaagtgattattatgaaataaaaaatcaacaactcgttttatatggaaataaacaaacattgaatactcataaatcaccagtttttataggagtaaggcaaacagaaaaagaatgttattttgaaactcaattgtcagtatcactaaaaccttcttcatcagcaggattagcaataattatggattgttgtcatcatatggaaataggaataacaagtcaaaatgaattatatgtcaaaaagactgtagctgatttagttaatattaatataatagaaaaagttataggtaaaattattattggaatagaagctaatcaagaatattatcaattttattatcaaaaagataatcaaaaatataaagttgatcaaacttatgtgaagcatttatgtaccgaaacatgtttttcagcattttgtggtgtttatggagggatgtttatagaaggagaaggaaaggcagtttttgactattttcattatcaagaaaaataaatttgtgttggaatgaagaataattcattccttttcttttgtcaaatttatgaaaatcatgtatacttttaatgtagaaagaagatgatggatgatgaacagcacagaatataaacatgaaacaataattcctaatgagagtattccagtaaaaatatttagtttttctgcgcataatgatttaagaattattccagcacattggcatcgttcagcagaaatattatatgttaaaagaggaaaattaaatatttggattaataaacaaaaatatgtattaaaacaaaatgattttatttatattaattcaaaagatgttcattcaacccaaagtccagaagataatgaagttattgtcttgcaaataccaggagactttttagaaaccttttcgaataaagagtctctatatattcactgcaatacaattgatattaaagataataaagaatttgataaaattagagaattactctatcgcatgcatttatgcagtgaaagaaaagatgatgcttattatttaaaagtctattcatatttatttgatttaggatatatttttgtgaaaaattttagagtgaaagaagctgatatcgatattaattcacaaaaatatttagatagattatctgaaatatgtgagtatatcaaattaaattatcaagataatttgactttaaatgatgttgcagaagaatttggatatacaccacaatatttagcaagattgtttcaaaaatatacaggaagtacattcttaacatacttgaataatattcgtttaaatgctgcttttaaacaaattatgaatacggattattcaattttaacaattgcagaagataatggatttgctaatgtgaaatcacttaataagttatttaaggaaacttatggtatgactccaaatgcgtatcgtaaaaatattaagaattaaatatataatttcataattgacctcatttacaataattaatggatagaaacgtcaaaaatagttttatataataaaattgttatgagcgtaaacattacaaaatacattgcaaaggagaatcattatggcattagtacaagttgatttcttttctcaatctttaatgagaacagtaacatttcaggcaattattccaacagataaaattattaaaggaaaagttcaaacagaaaagaaaacattcaaaacattatatttattacatggggtttttggaaattatactgattgggtaacgggaacacgtattcaaagatgggcacaagataatgatttggcagttattatgccatcgggtgaaaataagttttatattgataatgagagaacacaggagtattattcaaagtttattggagaagaattggtgaattttacaagaagaatgtttccgctttctgataaaaaagaagatacttttatagccggtctttctatgggcggctatggagctatggttaatggtttaaaatattatgacacttttggatatattgcatctttatcagcagcatttttaattgaatcatacccaaatgcagtagatggagataatgtgagctatctatcaaaacgtagttttttagagagtatttttggtgatttaaatcaattacaaggtagtgataaagactataaggctttattattgaaaattcctcaaaaacaaatacctaaaatatacatagcatgtggaacagaagattttttaattaaagaaaatagagattttagagattatttaattgaacacaatgttgatgtaacttatgaagaaggtaagggcacacatgaatgggatttttgggattgttatatttatagagttatacaatggcttccattaaaacaacaagctggtataagtagtggacatattgatgggtaaagaatcttcggattctttttcttatattaaaaattgacaatagtttggttaaaaattgtcattgataaattatattggttaattattgactattttttagtcaataatagcgtagcgatagatgggtagtttcagtataataatgtctgtaatgttaagcgctaacaaaaacaaatttgaggaggaaaattaaaatgagtaaaatggaaaagttttttgataaaataaatccatacatgacaaaattagcaaataacccaacattaaaaggaatttcttcaggaatgatgggatcaattgtagtgacattagttggttcattatgcttattattagcagtattccctattgatgctgttaaaaatactgttaaagcattaggtttacaaacagtattctttgcaattaatagtgtaacgattggatgtttagctttatatattgttgttttggtaacaaattctttggtaaaatcttataatccaaatgaagatggtttatctgcagcagttattggtttattatctttctttattgttactccattaggtgtaacagtagatgaagtcactgcaattccaacaacttggttaggggcagcaggagtattctcagcattaattatttcaattattactgcaaaagtatttgtgtttgtaaaaggaaaaggatggacaattaaaatgcctgcatcagttccaccaatggtatctcgtacttttgaaggattagttcctggtattctgattgctattatctttattattatcaattgtatttttaaacaaacaagttatggttgtatgcatcaatttgtttattcaattttacaaacacctttacaaggtttaggtggtaatttatgggctatgtgtttgtttactattgttgcacaattattatggttctttggtattcatggaacaaatgttatttcacctatttatacaccaatttggttaactttagatttggctaatcaagcagctgttgcacaaaatggtatgggtgctggagaaaatattatcggtatggctttctttaatacatttacttggggtggatgtgttctaggctttgtattattaatggcatttgcttcaaaatcatctcaatataagagtttaggtcgtttatctttagtaccagctttatttggaattactgaaccagttatttttgggacaccattagtcttaaatttcattttctttattccatttgtatttggtaatgttattgcaattttagtttcatatgctgctattgcatcaggattggttccaacattaatgggagcagcaacagtctttggattacctattggatttcatgcggcagttcaaggaagttggcaagctgttgtattacaaattgttgtaatggctattgttggattagtatggtatcctttctttaagaaagcggataatgatgcttataaactagaacaagaatcagtaaatcaataggaggttgcttctatggaacaaacaaaattaaaagagttgtttgatagtttaactttagatgaaaaaattggccaattggttcaattaaatggtaatttctttaacagtaatgaaaaagttgctactggtccagtagctaagattggtattgataaagagaaagtctatcaaacaggatctatcttaaatacaatgggggcaaaagaactcaaagatatacaagatagatatttagaaaaaaatgataaaaaaatacctatgctttttatggcagatattattaatggatttaagacaatctttcctattccgttaggattaggttgtacatttaatccagagttagtcaagaaaacagctgaggttgcagcaaacgaggctgcagtttcaggaattcatattactttctcaccaatggtagatatggttagagatgctcgttgggggagagttatggaaagttatggtgaagataactatttaaattgtgcatatgcaaaagcaatggttgaaggatatcaaggtaatggagatcaacattcaacaattctatcatgtgttaaacactttgctggatatggggcacctattgctggtagagactataatacagtagaattaggagaacgttcacttcgtcaagattatttaccttcatataaagcagctgttgatgctggatgtgaacttgttatgacttctttcaatacaattgatgggattcctgttacggcaaatgattggttactgagagatgttttaagaaaagaatggggatttgatggtgttgttatatcagaccactcggcagttaaagaacttgttccccatggaattgctagagatgaaaaagaagctgcaaaattagcacttgaagctggatgtgatattgatatgatgacagcaacttattcgaatcatctagctagtttagtggaaaatggtcaattagatatcaaatatatagatgaagctgttatgcgagttttagaacttaaaaataagttagggctatttgaaaatccttatcgtggagcagatgaaaagcttgaaaaagaagttgttctttgtgaagaatttagaaaatttgcaagagaagttgtttctcaaacatgtgtgctattaaaaaatgattcaatcctccctttaacaaagaatcagaaggtagcagttgttggtccatatgcattcaataaaaatttaagtggaatgtggtctatcaatgttgattcggaaaaagttgttacaatttatgatggcttaaaaaaacaagctaatgaaaattgtgtaacttttgcaaaaggttcaccattattagatgatgatcatttatttgaaagctttggatatgcaaaaaatattggagagcttgtcagtgataatccggtagaagaatgtcaaaaagcagttcaagttgcttcacaggcagatattgttattgtggcaattggagaacacccacatcaaagtggtgagggtggttcgagaggtgaaattacacttcctcgagttcaagttgaattgttgaaagaaatgaagaaactagggaaaccaattgtaactcttatttttagtggccgtcctcttgcattaagtgaagtttcacaatatagtgatgcaatgcttcaatgttggttccctggaactgaaggaggagatggaattgccgatattatttatggcaaagttaatccaagtgctcgtttatctatgacattcccttattcagtgggacaatgcccaatctattataatgaaatgagtacaggtagacctgcaaaaggaagtactcatagtaaacgattcacttcgcgctatattgatattcctaatgagccaacttattgctttggatatggtttaacttatagtgaatttaagtatagtccgattgaattagattctcatattttaactcctaattcttctattaaagcttctgttgttgtagaaaatataagtgaacaagaagggacagaaacagttcaattatatataagagatttggttggttcagttgttagacctataaaagaattaaaaggtgtgcgcaagattttcttaaaaccgcatgaatcacaaaaagttgaatttgtaattacagaagatatgttacgttttgtgagaaaagatatgaagttcgctagtgaagaaggagactttgaaatctttattggaaaagacagtttaacagaaaataaagatacatttgtattgaaaaaataatgaaattgctctattttgaaaaaaatagagttttttcattattttaaaagaaaaacgagaaataaatgcgtatatatataatagacgggtattgaataaaatttgctttatgctattatattgttgaacatacctcatatgaatatcaaagttttgaactataaaaagggaggtatgtagaatgttgaattgtaaagctgatccaactttaaaagattatttcagggataaagttcattttgctgattttttgaatggtatctatttctctgggcagcaggttcttttacctgaacatctatcagtcgttgatacggacatgtctacggttgttgagggaaagaagggcactgtcagttttaatcgcaatcgtgatgtgatcatgaaagataatcaaaatggtatctatgtattaaatgcgattgaaaatcagaaagcaattgattatacaatgccagtaagagtctttgtctatgatgcattgatgtataatcaacagttaaagcaacttaaaaagaaaaagggcaagaagaaactgaagctagaaccagtgatgacatcagtcatctattatggggaaagatcatggagtgggccaaggtgtttaaatgacatgatgaagataccaaaggaatataaaggaatgatcaatgattgggatgcaagaattattgatatcaaggatattgatgttgatttatttcaagatgaagataacagagccctcatccaaggaatacagatgttttataggtggaatggaaaagaagaaatcaagttggaagtaaaaaaagaagttgccattttaattgcaagcatagttaatagtaaaaagtttttaaagataatcaaagaacaggaaggagagaaagtagttatgtgtacatcattggatttatttgcaaaaaggaatagaaaagcagggtttaacaaaggaagaaacgaaggaaaaaagacaatgttaatagagttgttaaaaacaaagattggatatttatcaaaagaaacaattcaattaattagaaattgtaatcgaaaagagttagaacaattaacaaagcaatttattatgataaataatcaggaagatatattagaaatattagacatgcactaagaaaaccagaattaaatttctggttttcttatcttaatgatataggtaatgaataatttctttcactatttttatttacatacaagaatcattatttaaaatatctatgacagaataattttctagcaataaaaagttttatcgagtaatatataaatataaaaaactttgtataagatatgagagatgaggtatgaagatgaaactatatagaccagtaggattatatgagatgaaaaaaatattagaaacagattgtaaagcatttcctcctaggcaaaaacaacaaccttatttctatccagttttaaataagtcttatgctaaggaaatagctttttggaatgtaaaagataaagattcaggatatgtaggttttattactgaatttgatgttgaggattcatatatagaaaaatatgatgttcattgtgttggcaatgaaacgcatttagaattatggatacctgcagaggatcttcataattttaataagaatattatcaatcaaataaagattgttgatgtttattatggcgacgattataaggggttactaccaagaggtgtatcaggttttaaagagacagatgtttataaacaaatagaattattacaaaatattatcaaatataatgaatttgatttttatggaactgtcttggttgaatgggaattattaaatttaaatttacttttttggaaaagtttgggtgttgattcatatcttatcaataaaattgttgagtatttacaactcacacataaatactttatatcagaatcattattaaaataatgaaaaaagatacagttttctctgtatcttaggtgctcaatgtatcgattaattaccgccgggtccatcctggcgttttctatcatctggataatactttagattgttattagtccattgattgtctgtagcagtttttttgttttctttgttttgtttattcaatttttcttttgacattttcatcactccgatattattttgtgaagcaaagactgaagtattcattttttataaaaaaattttcaatctattttatgaagcgttataatgtatacaggtgatataaaaatgaaaagacaaatagaaattcgatgtggaaattatagtgatgcattaaatgcacaaaatggaggagcttctcgcattattttaagtaatggattatatttgggtggattaacgccaagtattggaacacttttaaaggtgaaagaaaatacagatttagaggttatttgtttagtgagacctagaacggctggtttttattataatgatgatgaatttgagacgatgatgttagatgcagaagttttgttagataatggtgctgatgggattgcttttggttttttagatgaagaatgtgatattgatattgttcatacaagaaagatggttgatttaattcattcttatcataagaaagctttttttaatcaagctatagattgtgtttatgatatagataaaacaatgtgtattttaattacaatgggtgttgaaggaatttatacaagtggtcaacaaaaaaatgcattgaagggaaaagaaatgattcattatttacaagatacttatggtcaagggattgaagttattgcagtagaaggaattaatgtggataatctcacaaagtatatggataatacaggaatctttatttatcaaacagcatgtcttgattgggatatagatcctacaacagtgaaagcagatggattatttgattatcatgatggtgagtttgaaaaagtgaattgggaattagttgaagcttatgtagatgaagttgaagatgatttatatgattttgagattgtgtgaggtgaagtatgaattttaaagatgatattaaaaattatcaaccaattaatgaacaagaaatccaagaccaaaaagtcattattcaattaatcgaacaatctccccatattttaacaagagataattatgttgcccatatcacaagttctggatttattatgaatccgactcttacaaaagtcttgatgattcaccataatattatgaaaaaatgggcatggacaggtggacatgccgatggagaaagtgatttattagctgttgcactcaaagaagcaagggaagaaactggtgttaaagatatccaacccttatcttctcaaattgcttcattagatattttgccggtttccagtcattttaaaaatggttgttatgtgaatacacatttacatttgtcggttgcttatctattaatatgtgatgagaatcaacctttaaagatatgtgaaaaagaaaatagtggagtggaatggattgatattgatatgattaatcatcaatattttagtgaacatgatgtttatctctatcacaaattaatagatcgtgctcaaaaggaggttgagaaaataagatggaaataagagttttaaaatattttcttgcagtcgcaagagaagaaaacataacaaaggctgcagaagttttacatattactcaaccaacattatctagacagttaatgcaattagaagatgaattaggagcacaattatatattcgtggcaagaataaaattacgctcactgaagaaggaatgttgttaagaagaagggcagaagaaattgttgatttagccgataaaacagaaagagaatttttacaaagagaagatttgattgcgggagaaatttacataggggctggagaaacttatgcaatgcgtcaagttgctaagatgatgaaagaatttagtatacaatatccacaagttcaatatcacttatttagtgggcaggccgatgatattaaagaaagaattgataaaggcttaattgattttggccttcttaccgaaccggttgatattgaaaaatatgattttgccagacttaattataaagaaagatggggaattattgttcctaatgatagtgttttagcttcaaaagaacatgtaacccctcaagatttaatgaatcaacctttattaattcctcaacgttcaatagtccaaaatgaaatcgcacattggtttggagaaaatcatgaaaaactgaatattatagcaacccataatcttatctataatgcagctatatgggtagcagagggtatgggatatgcttttacaattgataagttattttatggtgatgaggaaattccagttacttttgtacccctctatccgactttagaaacaggaactgttattgtttggaagaaacatcagatattctcaccagcgatgtcacgtttgattgaaaaaatcagacaaacatttaaagcttaaaaaagacatgttataataaaacaaagagaaataggaggattataatggaatatttagttttagatgtcggtggaagtgccatcaaatatgcacttatgaacgatgaattagaaatgttagaaaaaggaaaagtaccaactccaaaagaaggattagaagaatttaaacaagctgttcaatctatttatcaaaaatatcaagaaagagtagatggaattgctatgtctttaccaggacttatcaataaacatacacgtttagtccaagttcctggggctttggaatataatctaggagtagacattttagcagaattacagtcagttacaacaaatcgtttaacaattgaaaatgatgcaaaatgtgcagctttatgtgaagttgaatatggaagtttaaaaggtactgatgtaggagcagtttgtattattggtagtggtattggtggtggtgtcactattggggataaagtttttacaggaactcacggttttgcaggtgagtttagttacctatctacagattggacaaagcaagttggctttgaagctaagtggggatatgatagcagtgctttatatttagtggcttctattgcccatgcagttggagaagatccaaaaatatttgatggtatgaaagcttttgaatactgtaatcaaggtgacgaacgtgctttaactgctttaaaggcttatactgataaattagcaatgggattattcaatattcaagcaactgttgatccagataaaatagctattggtgggggaattagtcaacaacctatcttacatgaatacattcaaaaatcattagatcaaatctatgaaaaaatgccaatcccaattccaagagttcaaattgtaccatgtacttattataatgattctaatcttgtaggagcacttgcaaactataagaaaacatataatgcctagtaagcattatatgaaataggttataggtattagacataattgaatagaaactataaaatgtagatgtcaaaaggatatctacattttttgttgtaaggaggtatgttatgaaaattaaagaagtcagtgaaaagtacaatgttcccatgactgcattaagatattatgaaaaagcaggattgtttaatcaagtcaaaagagtcaatggcataagagagtatgatgattcggatattgaaaggttaagtttgatcttaactttaaaaaaagctggtgtccatattgaaaacatcttgaaatatattcaattagatgaacaaggacagtcaacatcaatccaaaaaattcgaattttaaaacaagaaagaaataacatcttagatgagattcatcaacgtcaaaaaaacttagatacattagattgtttaatctataaattaaaggaggaaaacaatgaatacaaataataaaaaaccttggattattttagctttatgttgtggtttagccgcttcgtcaattggggtatctattaactcatcaggagttttctatacacctgtttcagaaagtttgcatatgatgcgaggaacattttcgatgcatatgacaattttttcgttagtcacagccattacttcattatttgttccacgtttaatggaaaagttttcttataaaatgattttaactgtcagtgtttttactgctgttgtttcaactggattaatggcattaggaactagtgccattgtattctatattttaggtgctattcgaggcatgagtacagccatgttttcaattgttccattaactttggttattaatggttggtttgaaaagaaacatggtcttgcaacaagtattgtttttggatttagtggtttagcaggttctatttgttcacctatcttatcaagttgtattgaaacatttggatggcaaatgggttatatcataaaagcaattattcttttatgtttatgcttaccagcagttttatacccatttcatgttgatgcaagggatgatgggtatttaccatatggttatgaagaaaagaaagaaaatgatgtttctgtagaaattccaactttccattttataacagttgcttttattagtttctttgtctttggtttaatgtgtagttgtattacaagtgttacccaacatcttccaggatttgctgaatctattggttatagtagtgttgtaggagcttcgcttttatcagcgggaatggtaggaaatattgtttctaaattagttattggaacattgagtgatcattttggttcaataaaagcaacaattgttatgattattgccaatactttaggaattgtgatgttgatgatgggaaaatcagaacttctcttattagttggagcattcttatttggttcttgttattcaattggagcagtggctttaccattacttacaaagcatttctttggtagtaataactatgccaaagcttttcctagtatttcctttgcatccaatttaggagcagccatttcactatcaatggttggatatatttatgatttctttggttcatatatgtacgcatttatgattgcattgataatgattgccttagcagtcctattactggcaatcacttcaactttcacaaaacaacattaggaggaaaagaaaatgagagatttaaacaaagccaatgagttatttcaacaattacatgatgaagatattttaaatgatgatctagagttacaaacgattatgaaaaattatatctatggagatgtttatcaacatggaacattagatttaagattaagagaattgattttaattgttgtaaatacaacaaatcatacccttacagctttaaaagaacatgtgaatgcagctatcaaagcagaagtttcacctattcaaatcaaagaagtcatttatcaatgtacaccttatattggattaggaaaggttcaagaagcattagaagttgtaaatcttattttcaaaaaacgtaatatttctacaaaaccacaagcaacagtgaatgaaaaaacaagatttgaaaagggttttgaagtacaaagtgctgcttttggaaaagaccatattcaagctaatcatgatcaagctccacaagaattaaaacatattcaaaaatatttatcagaatattgttttggtgatttttatacaagagaaggattagatttaaaaaccagagaacttatgacaatggttatgttagcgactttaggtggttgtgaaaatcaattaagaggacatgttggagctaatatcacagttggaaatagtcgtgaattactgattgaaacaataactcagtgtcaaccttatattggttttccaagaacattaaatgctataacaattattaatgaagtgacaaaataggaggataagaaaatggaagaaaaagatgttttgtttggattaggcgaccctaatgatgcttatgctaagtattttgatggacaaagttatttaaaaagattaacaacaacaggaggaccaatggcaaatgtaacatttgaaccaggatgtcgtaatcattggcatattcatcataaaagtggacaaattttattatgtacaatgggtagaggttattaccaagaatggggaaaacctgcgcaggaattaaaaccaggagatattattcatatttctccagaagttaaacattggcatggggcagcaaaagatagctggtttacacatatttcagtggaaattcctgcggctgattcaagtaatgaatggctagaagccgtcagtgatgaagattataatcaattaaaataggagaaaattatggaatatgtaaaattaggaaatacgggattagatgtttctcgtatctgtttgggatgtatgagttttggagatcctcaaaaatggattcataggtgggtattaaatgaagaagattcaaggaagattatcaaaaaggctttagatttaggaattaatttctttgatacagctaatgtttatggattaggagcgagtgaagaaatcttagggagagctttaaaagattatgcctctcgtgatgaaattgtaattgcgacaaagattagtgaaaaaatgagtgataagccaaatggtcaaggtctttctagaaaagcaattatgcaagaagttgaacattgtttagaaagattacaaacagattatattgatattctttatattcatagatgggattatcatacaccgattgaagaaacaatgtgcgctttaaatgatttagtaaggtcaggaaaagttcattatttaggggcttcaagtatgtatgcgtggcaatttcaaaaagcgcaatatgttgctgaaaagaatggctggacaaaattctcagttatgcaaggacattacaatttattatatcgtgaagaagaacgtgaaatgaatccattttgtttagattcaggagtcgctcttgtaccttatagtcctttagccgcaggaagattaactagagattgggatagtgattcaaaacgttttcaagaagatcaagttgcaaaaagaaagtatgatataacccaagattgtgatcgaatcattgttgaaagagttgcacaaattgctcaaaaatataatgtgagtagattgcagattgcagttgcgtggttatggcaaaaaggtgtcactgcgcccattgtaggaattacaaaagaaaaatatttagatgattttgttggtgctttccaagttcaattaagtgaagatgatataaaatatttagaagaagcatatgttccacacaatattgtgggacatcaataggagaaagatatatgataaaaatcaatgaaaaaggacaggcagttgctcctaagatacatttaataacagatgaagctttcaaaaaaatagaccatacagaaatcagatggttaggaaatgcaagtattatgatcaatagtcatggaacaaatattatgattgatcctctattagaaggatttgatatgccattattaatagatatgccaatcttacctcaagatattccaacattagatgctttattggttacacatattgataatgatcactttagtcgaccaacatgccatgatgttgtaaatgtttgtaaatcatatcatgctacaaaatatgtagctgaagttatgagagaagaaaatattccagggattggacatgatattgatgagtcttttatggtgaatgatgttaaagttactcttacaaaagctgtgcataattggcaaaatgaatcatcaaagtacaattatcgtgaatggaaagtagaagattattgtggctattggatagattcacaggatggaacaatttggttaccaggggattctaaactcattgatgaacatttgcatatgcctaatcctgatgttatcttatttgattttgcagataatgaatggcacataacattagaaggagcagtcaagcttgccaatacttatccaaatgctcaattgatttgtattcattggggatgtgttgatgcacctgatatgtcaccgtttaatggtaatcctgaaacattatttgataaagttgtcaatccagaaagaatccaagttttagctcctggtgaggcatttgttttatcatgaaaaaaacattatatttaatgcgtcatggtcaaacgatgtttaatgtacaaaagaaaattcaaggatggtgcgattctccattaacagaattaggaatacatcaagctcaagtggcaggagaatattttaaaaacaatcatattacatttgatcatgcctattcctcaacaagtgaacgttgttgtgatacattagaacttattacaaatatgccttatacaagaataaaaggtataaaggaaatgttctatggtgaattagaaggtgaaagtgaacgtctgaattgtgcaacacctaaagaatgtgaaacatattatcttcaatttggtggtgaatcttcgaatacagttagagatagaatgttaaaaacactaacggatattatggaaaaagatgaccatgaaagtgttttggctgtttctcatagtggtgcttgttttaactttttaagagctattcaagatcctacagaagaattaaagaaaggaataacaaattgttgtatattcatatacgattatgaagataatcacttctctttaagagaagtgattagacaccaattttaattcatgtcttaaaattgtcaaaaatttatataaaaataagaaataatggaaactttgcttcatcttcttaaatctatatgtctatctatgacaaaataagatatagttaagatagtaaataaaggagatgtgagaaatgattagaattttattagcttgtgcaggaggaatgtcaacaagtttattaatgttaagaatgcaagaagaagcagaaaaacgaggtattgaagtgactgtagatgctggacctgaaaaaaatattgaaaatttaatgggaacatttgatgttttattattaggtcctcaagttagatatgctattggaaatgttaagaaaatatgcgaaggaaaagttccttttgatgttattgaaatgagggactatgggatgatggatggcgttaaagtgttagataaagcattaaaaatgtatgatgatttctataaatagaagaacgaatacaaattcttctatttttttgaaaaatttttttcattggaaatgaatgattgaaaaataaagatgataaaacatttttatttaagaagcttaactacatttttttacaaggaatattataattgaagtacattaaaaaactttgaaaaaggggggggaattataatgattatagaaaaattattggatgctaatgatttaaccgaatcagaaaaacaaatcagccaatatatcttagataaaaataatgatttatcattaatgacaagtattgaacttggtaaaaatagttatacatcccaatcatcagtcattagattttataaaaaattaggatatcattcttatcgtgagtttatttcacgtttaattattgaaagaaacgagtattttaaagtcgatgatattgctttagaacaaccaactcaatatttttcgagttatgaagaaacacaaagtattatttctaaaatgtatgccttagcattaataaaaaccaatattttacttaataaaaatacagttataagagtgtgtaatcgtatatcaagtgcttcttctattgatatatatgcggtaggaatagcgaacgttattgcaaaacaaatggcttttaaattacagtcattaggtttatcttgtatgtttcatgatggtttaaatatgaattatataaagaaattagatcaaagaaatgtttcaattattattgctttatctggtaaaaatccaatgattcaaaccatcgcaaaaactctatctgaacaaaagaattatgttgtttctttaatgggacgtaaggaaaaaaatgtaatggaattatgtaaagataatattactttttttactcaagaaaaagatgatgtagatgtattggtagatttgttttcaggtgaatatattgttaatttgatatatactattttaaaagtgaagatggagaacctttgatttattattaataaaagactttatatattcatatttaaatgtttgatttcatttttaagaattatagtttttttcatattttgaatagagatagattttcatatttattattgataaaataaaatagagtggaggatgaatatgaaaaaagcagttatatttgatatggatggtttaatgattgatagtgagagagtcacttataatgaatatgttaaaaagttacatctattaggacatgatgattttactgaagaattatatagaaattgtttaggtaagaataaagtaggaatatgccaagtttttattgatcattatggtgaatcttttccgatggatgaagtatgggatgatgttcatgtttggattgatgagagtttacgcgcatatgtccctaagaaaaaaggcttagatgatttattacattatttaaaagatcacggttataagacaattgttgcaacatcaagtgctcgtgcaagagttgatgaaattttaaaaaacgcacaaattactgaatattttgatgatagtatttgtggagatgaagtgacacatgggaagccaaatcctgaaatctttttaaccgcatgtgaaaaattaggtgtatcaccaaaagaagcacttgttttagaagatagtgaagcaggaattttagcagcctatgatggagatattgatgttatttgtgtacctgatatgaaatatccagaacctgactatgcagctaaaacaacaaagattgtcgattcattagaggatgttattgattacttagaagatatttcctagggaatatcttttttaaaaaaggagagaaacaatgaaaccaaaattacactttacaccaccacaaaactggatgaatgatccaaatggtttaatttattttcaaggaaagtatcacttgttttatcaacattttccttatacttgtcagtggggaacaatgcactggggacatgctgtgagtaatgatcttgttcattttgagcatttgccaattgctttgtatccatcaaaatatgctgatcgtaatggatgcttttctggttcagcaattgcatatcataatcaattgtatttgtattatacatcaattcgttatgctaaagaaaatccagaatatgttcatgttcaatatagtgatgatgatttaatcgcttcacaatctgttgttatatctcaagatggttttacatttgataatcaaaatgataaacatcttgttgttgatgttattgaggatgaaaaattaggtgataaacgacatactagagatcctaaagtctggattgggaaaaatggacatgtttatatgattgttggaagtaaaatacctagtgataagggctatgatggtgaagttttattttatgaaagtgaagatggtttaaatttcacttacaaaaatagatatactgatgccaatattggagatatgtgggaatgtcctgatttaatttgcttagataatcaatattttttaatattctcaccagaaaatatcaatcaaccaccctatcctaacagcaatgctgtgattatgcgtgtttcttttgatgaagatacatgtacattaaaaaaacaaggggattatatgtatttagattatggtttggatttttatgcgccacagacatttctcgatgagtatcagcaaagaacaatgtttggttggatgcgaatgcgaaaaccagctaaagatgaaaattggtgtgggatgttaacaatgccaagagtcttaagaaataaaaacggacatatttatcaacaggtccatcctcatataaaaagactatttactaaagaggcaaagattattgattttgatcaaccatttcaattaatgacttctttaaaagaaggagaagaaataagcttagggggattaaaattaagtattaaaaatgattgtctttattgtgatagagaaaaagtatcaattgttgctgataaggtatgtaatatcaatcatacaccatgtttaaatggacaatatgatttagaaatttattatgatcaacatatttttgaaatttatattaacgatggatattatgttttaagtcaaattgtttatgaattagataaaaaagatatttcattaaacaaatatcaattatataatttattttaaaaagtgggctatcctttctttcaatctaaaaatgcaatataataatagtgaatagaaggtgatcatatgccaacaaatcataattatatgcttataattgggaaaaatcatttacaaaaccaaaatattgtagatatttttaatgatcactataaacctattattgtacaggatatttctaaagctatagaaagcttagaagcaaatcatagtcaaattggaattgttatgattgatgatagtatggataaagatgaaatcaaaaattttcttgatttttgtttatctaaacatttagatgtacagattccaatggtctttatagatggaacagaagatgatgaattatataatttagttttttctttaaagatagacgaagttatcagaaaaccatataatcctaatatatttaaagcaagagtattaaatttaactgctttatttagccataaatatcgtctacaatggctagtcgatacacaaactaaagaattaagagaaagcattgaagtattaaatcaaatgcgtttagaagttttagaatctttaggaacattggttgaatttaggagcattgaatcaggagagcatatttatcgtgttcgttttattacagaattacttatgcaagaatatcaacaatgccatccagaattagatatatctaatgaaatgatacatgaaataggaatggcgtcaattttacatgatattgggaaaatatctgttagtgatacaattttaaataaaccagcacgtttaactgaagaagaatttaatgaaatgaagaagcatacgatgtatggttgtgaaattattaaacaatttaaaggattgtataatgaaaaaacatatcaatattattatgatgtcattcgttctcatcatgaaaaatgggatggtaaaggatatcctgatggtttaaagaaagatgaaatacctttatgggcacaaattgtatccgttgcagatatttatgatgctttaacgaatacccgtgtctataaatcagcttatcatcattcaaaagctgtgaaaatgatttatgatggtgaatgtggaatgattaatccagaagttcttgactgttttaaaaatatagaaaatgaagttcatcaaactgctcaagctttatctggtgaaaaaattgaaagctttcaaaatgaagaagaaaactttgttatgcacaatttagaaagagaacgttcctatcatcgtgcttatactgaattattatcggattgttattttgaatatgatagtgagtatcgtactttacagcattataatatattaggtagagttggtttggaaaaatatcatgaagatatgtatagaaatgttcatcccgatgacattgataaattaaaacaagcaatcaatcagacctctagcagcaatccaactttgaaactctatattagaatacgatatggaatgcagttagcttatatgccttgtttagtgacaatccgtacaacgtgggatatttataccaataaacgtattggtggtgtaggaaaaattgaaatagtgagaaataactagtcatcgctagttatttctagttaaggaggatattatgatagaagttaatcatttaacaaaaagatatgatcaatttaaggctgcagatgatgttaatcttgtagcagaaagtggtaagattacaattttgcttggacctaatggggcagggaaatctacgacgattaaaagtattgctaatttattaaaatttgagggagttatcaagatatgtggttatcgcaatgatacaattgaagcaaagcgttgctttgggtatgttcccgaaacacctatcttatatgacttattgacaattgatgagcatattgattttattggacatgcttatcaaatcaaaaattatcaagaaaaagctggaaaatatttagaactctttaaactaacagaaaaaagaaagaaaatggctaaagaattaagtaaagggatgactcaaaaactaagcatgttattggcgtttatgattgaaccaagagctttattagttgatgaaccaatggttggacttgatcctgctagtattgaagatactttaaaattatttagagctttggctaatgaaggttgtgcaattttaattagtacacatattattgatattgttagtgatatatttgatgaagcttatattatgaataaaggacatattattaaacatgttagaaaagaagatttacaagaggaatctttgaaagaatatttctttgaattaacggatggtgaataatatgaaaacacttttacgactttggtttttaaaatcaaaagcaaatataagaaatttatttaaaaaaccaactagtgcaatatttacagtttgtatggttctcttatatggatttattattatcagcatgtttacaattaaacgcagtccctcaccaatgatggttaccatggatttacacacatcaatattagtattaataggttttctcgcattaatgttattttctacattaatgtcatctaaaaaagccttgttttatggtaatgatgccttcttcttgtttagtggtccttttactagaaaacaaattatggcatatcttacattacaaacaattgttcaatcagttatgataggcttctttgctttaatattttttgttggtatgagtaatggtttatcttttgaaccaatgtttgtatggttattgattattggggttatattcactattcttatttttcttgttttaagtgattatttatatgttttatccattggtgataagaaatataatatattatctaaagtgattattggtatatttgtttttattgttatgatgactttaataatgacttatttacaaacaggagaattaaagacattattcattgattttattcaatcaccattattttattttgttcctgtttttggttggctgaaactaggtttaattagttatgttaccaaagaatatcttttcgtatttattggttttgctttattattattaacttatatcatcatctatttattatttattaattatcaaggtgatttttatgaacaagcattacaagattccttagatttttcaaaaagatataaatcattaaaagaaggtaatcaaaatgctatgaaagatgtaaaggtcaaaaacgtaacaggaaagtttcaatcaggagcttttgcagttatgtcaaaaaacttcttactaatgaaaaaaacaggacatattttatctgctaatgatttaataacaatctctatttatattgttttagcaatttttactggtttaggatttggtttctttatttatatgatggttttatatatctttacatcattacaaaatagtgaactagcaactgaattaaagaactatcaaatctatcttattccagataaaccaataaaaaaattaatagctgttatgttaccaacgtttattaaggtgacacttattatgacaatttcattgatcattgtaggtatttattatcaaacagatttcatcacattaatcatgtatctcatcaacatgataggttatatatgtgtttttatgagtggtagtgtattaaccgtgagaatcttaaaaagtcgttcttcacgtatatttgaaaatttaatgagaatgtttatcatggttgtttgttcattgccaagtgtattcttaacagcatttgtcctcataactggtcatttgaatacagccacactaacgctaatttcttattcatcattatttatgaattttgtgattgcagtaggaattattatattatgtcaagatatgatgaatggtcgagagttaaagagtgagtagggattatatattcctacttttcttgtacggacatgaattgataaaaagggtgaagttgtgtatactgtaagaaaggacgtgattttatgagtaaatatcaaatgatatatcaagatttgttagataaaataaaacaaagagttattcaacctaatacttatcttcctagtgaaaatgaattaatgaaacaatatgatgcttcaagagatactgtacgtaaagccttaaatttattgttacaaaatggttatattcaaaaaaataagggaaaagggtctttggttttagatatggatagaattgctttcccggtttctggtgtaacgagttttaaagaattgcagaaaactttacatggggatgtagaaacaattgtaaatatgtttttagaagaagatgtaccaaatgatttaaaagatgatctttatatggaaaaagggaaaatctatcatgtagaaagaattagaaaaattgatggcgaaaaagtgatattagatactgattatcttaatggagaaattgtgaaaggtttaaaaatagaacatgctaagaattcattatatgaatatattgaaaaagaattaggcttgaaagttagttttgctagaaaagaaattactgttgttaaagcaacacaaagagaaaaacagctattagatatgttagattatgatttgttggtatgtgttaagtcatatacatatttagaggatgctacattatttcaatatacaatttcaaaacatcgccctgataaatttagatttgttgattttgcaagacgaacagaattatagatgagtgattcttcattcatctttttttgaccaattataattaataaagaaccacctgtttaaaagtaaaggtatttctttttataactgtatataatgaaattgaaaaaggagggaaacatcatgaaagtgaaagttgagttagatcaagactgtattgaaccaatcatatcaattaagacaaaagaaatcacaaatgaaattaatgaactgatacagtttcttaattctaaacaatatgagatgattgcaggattctataatgatacagtagaactcttagaacaatcacaaattattagattctatgcgtcgcaacaaaaagtttatgctcaagtcaataataaagaatatgtcattcggttaaggttatatgaaatcgaaaatcgattaaatcaaaaagaatttatacgaatttcacattcggaaattgttaatctcaaagcaattgaaaaattagatttaagtttttcagggactattcaattgcttttatctaatggagaagtgacttatgtttccagaagatatgtaaaaaaaataaaagaaatattaggaatatgaggtgagagacatgaagaaaaaagtattattaagaggtttgtttggaattacattaggtataacaatcagttatcttataacgattataacttcacttatttatggacaaggttattattcaccatgtgtacctcaatttattgattatgtaggtagtgaaataggtgctgttattttacaaacagtattaagtggtttattgggaagtgtgtttgctatggcatcaattgtatgggaaatagagcattggagtattgttaaacaaacaggtatctattttgtttgtacatcattagcgatgtttccaatagcttatataactggatggatggaacatactgtgatgggttgtttgatttattttggaatctttgttattatctttgtttttatttggatggtacaatatttcatctggaaacataaaattgaagctattaataagaatattcatggttagtttatccaagctgtcaagcaaatttgaaaatgtctcaaaaatcgttaaacattagcaccaaaatttcggtgcttttgttttgcgagataatttagataagaagcttgtttccatggatggctcattggtggaatatatttcttctttggcttcttttcaatgacttttttatcaaattctatagaatatagttcgtgttcgggcacttctttcatgatatgaatctgatcaagtacattgacatatagatttccatcaaacgcttcaatgaccatacaatccatcttgttttttagatatgtaggtattcctttttcggttacaggaatatatatcttattcttgaatttgatactatgtcctgaatctatctttcttggagaaagaacagctaaagtacaattgattttttcaagtgatggttgcgtttcaaataccgatttggtagtattgaggtgtagagcaaattggtcattgaatttttttaggtaggattttaaaaattcatttgccgactctatatctgttatgtgagcgcgtctgaggtcaacaggcaatcgtgactgaaatgtttggttcattctttcgattcttcctttggcttgggcgacgctcgttgtttttatatcaacgccaagattgtgacacgcataggaaaactgtgtgaaagtatcctcgtcatcgaaagcgttgttttttcttttatattcaaatacagtacgtctgtcggtataaaacatagcaggaatgccataattggtaagaatctgataaaaaacgttgtagtagccttttaaagtttcctgattatcgaaataagcaccaacaacttcaccagttgcatcatcaactgctaaatgaagatgccatactttatttttgagccattcataacttgatgcatccatctggatcatttcccccatatacttgcatcttggtcttcttgggtgagcatccttttcatcaacaatagcaattgcttcctttataacattttggattttctttgaacttgtattttcgagttttgttttcaaagtttcctttaatatttttctggtcttttttctggcttttggagaaatgatattttcttctctaagccatttattaagtgttgtatcactaatttttatattcagatcttcttcaatgatttcacagaaatgagtaaaattagcatcgctatattcctcaatataaagcttgatgatcttattcttaacatcaagaggaattgcagtagaaggaattttacttctattgccgtgaacaaaaccagccttaccttcattcttatatttcaaaataagtctattgacagttcttacagtacaattcaatttaatagctgcacgtttcttgttaccatcagtttcaactaattttttaataatcaaatatttattttcttcattcattcttaattcaacctttctcattgcataacctccagataaaaatgaggttatatcataacatgaagttttgaatatgtcctgcatgcaggacatattcaactttgatacattgagacaatatcatatttgaatcagagaatattcatggttagtttatccaagcttgacattgaaaataagtttgttataatatgtgttgctcggagggcaaatcaaaatgattcgctggataagagtataggtcaataatctatacttttgtccagcttttttaatgtaagggaggaattgatatgaactttttaagtggaaacttaaaatcactttattttaaatatcttgctgctgcatttgggagtgcactgattacatcagtatattcaatagttgatatggctattgttggtcaatatcaaggaccggatgggacagcagccttggctgttgttgcaccaatctggaatattatttttagtttgggattattaatgggaattggtggttcaattattctcagtacattaagaggacaaagagatggtcatcatcaatatgaaaatgaatacttttcatcagctgtgataggttctactgctttaggattaatcatgtgggttttacttattttctttgataaagaattatttatattctttggagcaaaaggaaatcttttagcccttgcacaaacttacatcataccaattaagtttgttttaccatgtttcttgtttacacaaatgttagcagcctttttaagaaatgataatgctccaactttagcaaccataggtgtattattaggtggaatatttaatatctttggggattacttctttgtatttactttagatatgggaatctttggagctggacttgcgactgcaataggatcagttatttcttgtatcatcatgcttacacattttttatcaaaagaaaatacccttcattttgttatacctaaacatatattacaacaattacaaaagattgtgattaccggattttcaactttttttattgatatagctatgggaattttaactattttatttaatcgacagattatggcttatctaggaagtcaagctttatctatttatggaattattgttaatattagtacctttgtacaatgttgtgcctatagtgttggacaagcatcacaacctattatttctacaaattttggtgcaaagtttggtcatagaattaaagaaactttaaaatatgcattatatagtgttgctttctttagtattctatggactgctcttgcacttcttgtaccaaatatgttcgttaaaatttttatgacgccaactcatgaaattcttcaaatagctcctcctattataagaatgtatggtttatctttcttgttgttaccatttaatattttttcaacatattatttccaagcattattaaaacctaaaacatcatttgttatatcagttggtaggggattggttttgagtggcattttgatttatctgttgccactaatcaatgcagattatttatggttgacaatgccaatcactgaatttattgttgctatatatgctgttattcatatgcgaaagtgcacaaaaagtttacctattgaatcaagaagttaaaatttaattaacttctttttattttatgttgacatacatgtacgtacatgttaagatatgttcgtcaaagatgtacgtacaagttcaaaaaggagagaaaaattatgggtaagtttcgtcaagatgcaagtgagctcttaaaagaagttggtggtaaagaaaacattcaagcagttacacattgtgtgactagaatgcgatttgtattggttgatcctgataaagctgatgttcaagcaattgaaaaaattccttcagctaaaggaacatttacacaatcaggacagtttcaagttattattggaaatgaggttcaagagttttataacgattttattgaaattagtggtattgaaggtgtgagtaaagatcaagtcaaacaatctgcgaaaagtcaacaaacaagattacaaaaagtgatgagcgatttaggtgaaatcttcgcaccaattattcctgcattgatttgtggtggtttgattttaggatttagaaattgtatagatgctattgagttttttgaaaatggaacaaagactttagttgaaatatctcaattttgggcaggtgtagatagttttctatggttgattggtgaagcagtttttcatttcttgccagtaggaattgtttggtcaattactaaaaagatgggaacaagtcaaattcttgggattgtcttaggaattacccttgtttcaccacagttattaaatgcttattcagttgcttcaactccagcagcagatattccagtttggaattttgggttcgcccaagtccaaatgattggatatcaggcacaagtcattccagctattttggcaggatttgcattggtatattttgaaaagttctttagaaaaatatcaccagctgccattagtatgattattgttccattttgttcattagtattggcagttttagtagctcatacaattttaggaccaattggttgggtcattggagattatatttctaatattgtttgggcaggattaacatcatcagtgaattggttatttgctggagtatttggtttcttatatgctccattagttattactggtttacaccatatgacaaatgcaattgatacgcaattagctagttcttttggtggaacaatcctttggcctatgattgctttatctaatattgctcaaggttcagcagttttagcaatgattgttttacaaaaagataatgaagatgcgaaacaagtttcaattccagcatgtatttcctattatttaggtgttactgaaccagcgttatttggagtcaacttaaaatatgtatttccgtttgtatgtgggatgattggttcatcaattgccgctattatttcagttgctacaggaacaatggcagcatctattggagttggtggaatcccaggtatcttatctatcttacctcaatatatgcttaatttcttcattgcgatgatagtggctatcgttattccatttggattaacttacattgtaggaaaacaaaaattaactcatgaagacaatactgaagtagaaaaagaattaacctttgtatcacctattcaaggaaaagtcatgccattaacagaagttgaagatcaggttttttcacaaggcttgatgggcgaaggatatgctgtagacttaacaaatggtgaagttgttgccccttttgatggagaagtcgttatgacatttcctactaaacatgcttatggtttaaaacgaagtgatggagttgaagttcttattcatcttggaatggatacggtagaattaaatggcgaaggttttgaatgtttagttgaagtaggacaacaagttcaacaaggacaaatcattgctaaagttgatttagattatgtacgtagtcatcataaatcattaatttcacctgttgtttttacatctggacaacatatagaactttgtcaaaaagaagaagttcaattaaatcagaatattattcaaatagcatagaggagaatcgttatgtcaaattttaaaaataaagtcatttatcaaatttatcctaaatctttcaatgatacaaatcatgatggaataggggatattaatggcatcattgaaaaactagattatttaaaagaattaggaattgatatgatttggatgtgtccaatctttgcttcaccacaaagagatagtggatatgatattaaagattattatcagatagatccaatatttggaacaatggatgacttagatcatttaattgcagaagctcaaaaaagaaatatttctttgatgtttgatatggtatttaatcatacttcaacagaacatcaatggtttcaagaagcattgaaaggtaatggaaaatataaaaattattatttctttaaaaaaggtaaagacggacaacttcctactaattgggattctaagtttggtggaaaagcttggaagtatgttccagaatttgatgaatattatcttcatttatatgatgagaaacaagctgatttaaattggcaaaatgaagaagttagaaatgaattaattaagattattaatttttggcttcaaaaaggaattagaggtttccgttttgatgttattaataatattgataaacgtagttttgaagatagtcctgatggactagggaaacaattctattgtgatcagccaaaagttcatgattacttacatgaattaaatgtaaactcatttggtaaagttaatgattgtattacagttggagaaatgtcagcaactagtgttgaaaattgtattggttatacgaatccagcaaatcaagaattagatatggtctttagttttcatcatttaaaagttgattatgtaaataaagaaaagtggacatctatgccttttgactttaatgaatttaaagatttacttcatacctggcaagttaaaatgcaagaaggaaatggatggaatgcagtctttttgaattgtcatgaccaaccaagagcagtttcacgttttgggaatgatcaacaatatcgaaaagaatcagcaaaaatgctagcaaccactattcatatgatgagaggaacaccatacatttatcaaggtgaagaaattggtatgacaaatcactactttactgatatcaatcaatatcgagatgttgaaagtattaatgcttatcacattttaaaagataaaggattaccagaaaaagaaattcataaaattttacaagaaaaatcacgtgataattctagaacaccaatgcaatggaataatgcaatcaatggtggcttttcagatgttactccttggctacaagttaatgataattaccaaacaattaatgttgaaaatgatttaaatgattctgattcaatttttaaatattaccaaaaattaattcgtttaagaaaagagtatcaaatcattagtgaaggaatgtatgaacccttatttattgatcatccaagtatctttgcatataagcgatattatcaaaatgaagaacttattgtcttaaataatttctatgctgaagatacatttgttgatatccaaggtattgaagaatatcaaattcttttatctaattatcatgaacaagatttaaaaaatcatttaaaattacgtccttatgaatcacttgtattatataaaaaataaatgaaataaagtttgacttataaaacaccacgtgttatgatgagaccgtaataaaaggcaacaaattatgattcacattgggaattgttattgagcacttgatgtacacaaattccatatgtgaattttttatatcaatgcttccttttgttaacacaaagaaggaggtattcaaatgaatacaggtaaagtaaaatggtttaattctgaaaaaggttttggtttcatcacagttgatggtggaaaagatgtattcgtacatttctcagctatcaatggtaatggattcaaatcattagaagaaggacaaaacgtaagcttcgacatcgttgaaggtgacagaggtcctcaagcatctaacgtaacagtattataatcaatgaaaaacaagagaaatcttgtttttttctttattttttttaaatattgaaaataaagtttgacttattgattgtaacgtgttagggtgagagagtaatagaaggttataaattataattcacaaaaaaggattgtatttagcacttgatgtacaatctccatttgtggattttttatatcaaagcttccttttgttaacaaacaaaaaaggaggtattcaaatgaatacaggtaaagtaaaatggtttaattctgaaaaaggttttggtttcattacagttgatggtggaaaggacatttttgttcattattcttcaattgctggttatggatataaaactttagaagaaggtcaaaatgtaagtttcgatattactcaaggtgatagaggaaaccaagcatctaacgtaacagtattataattgtataaatattgacgtaaaaatgaaactagagcattatgttctagttttttttgtaattaaaaatataaataattaagaaaataatgaaacctatgatatactaattaaagaatcgaaaatgcgatgaagtaataatatggagagaaaaaaatatggcaatgtaatgatgatattgcagaatataatatagggaaagggtaatatatgaaatacatattttttgatattgatggaactttagtggatttagttgataatcaggaagtgatttatccatctacacaaaaaacaataaaacaattaaaagataagggatataaagtggctattgcatcaggcagatcattaatagaaatattaccaacggcacgaaaattagggattgataatattgtaagtgatggtggttatggtttaactattgaagggaaacttcagtatattcatcctttacctcatgacatcgttcaatcactaagtcaggaattgatagaaaagaagattccatttgcttttttgactaacccatcaaaaaaagaattatttgctagttcacaaatgttaaatcatcaatatgattttgattgtgaaggtattcaattaacaatagatgaaacttttgactatttaaatactgatgcatataaagtttttatggcaattcatagaggtgaagaagatcggattgaaacggttaatgctcatcagattatgcgttatcgagaaggaagtcttgcttatgaaccagatgataaatatgctggggtaaaagaatttgttgaatattatcatggaagtatggaagatgttattttctttggtgatggattaaatgatataggtatgtttgaacagatttcttgtacagtagcaatgggaaatgctattgaggaagtaaaaaaattagcttattttattactaaagatattaaggaagatggaattgaatatgcttgttgttatttaaaattactataaaaagaaagacttaatgtcttttttttattaaacagtatttaaataggttattgtattgtatgattcatgataatttatgtgtgcaaaagaaaagttccctgtatgatatttaagaggagtatatgacgctttaatagggaacctaatattaacttatgcaatcaaagtaattgtgtgaataaaaaaatctttgagggataaggggatgtattagtgtatatatagatgaggagggagatattgtggataataaaatcataaaaagtattcaaaatcaaaatgataaagcatttgaatatattgataaagaatacgggcagcttatacattatattctttataatttacgattaagtcatcaagatgttgaagaatgttataatgatattttattaaaattatggacacatttacaatcttatgatgttcgccaagcaagtttaaagaattatattgctttaattacacgaagaacaggattgaattatgttagaaaaaataaacgtttatatgaagaaatcttatatgagcgtatggatatttttgaaagtcaaactcaaggggaggagatagattgggattatattgtagagcagttgagtttttatgaaagagatttattttatcggtatttttactatttccaaacaattgaatctatttcactagaaaaaggaaaaacatataaatcagttgaaagttctatctatcgcttaaggaaaaaattaaagatattattagaaaaagaggtgaaaaaatatgaatgatatagaattaaaaaaatatgtgcaacttccttttcatccattatccagaatgattacttatttacaaataggtttattgttattttcctttcaaatagattttggttacttaaaatatatatttgatattattggaatgttttgtctttattttgggttacgaatgattaaagatgcaagtatgtattttaaaagggcttattattgcattattgttgatatgataataaatattgtttttttatcagtacttgcaacaccttattataaatatgcagattatctttattatatctctgtaccaataacatatcttataatttatttgatttatatggggttaaataaatattgtcatgaaagtggatgtactaaattttttgcgacgtatattattatacaaattataggtataataggtttgtttttagaaggaatatgggaaattgtttctataattatgtttgttatagggtttatatttttggtttatactttatcatctgtaaaaaaagacatattaactcatcaatacttacttaaactttcaccagtaaaacacaatgcatggtttgtgatgtttatttatattttgacgttatgtataagtgtttcaggatgttttttagtgacaacttcaagggcttatcatcaagatcctagccaaatacatctacaaagttcaaataaaggtaaaagtgttgataaaattgttgaaaaagatgatttgaagttaaaagtcaaatatacaattacccaagatgaagaacaatgttatgttcatgttattgattatgaatggttagagtttccagtatacacattcatggcaaatacaactatatttaaaagtcaggaagtactttatgaatctattaataataatgtttatagtgataagcaaagttataaatcaattttagaaaatgatcaaatatcagattggttttcaatatcagatgtatgtaaatttaaaacatatgtgaatccatggaatcatcaaattaaaggaaggatttgtataacaatgaaagctaattataaagatgcattttttgaaataccaatcacttttggaatcaagaatcgacctaagcttgtatataatgaaaaagatgatcaaaatatacaaattattgtgcttatagatcaccaagaaataacaacgtggaatgaacagtaaagtggaaaattttccacttttattatgaattgatgtataatgaaaagcataaagagtggtgattttatgaaagataaaaaacaaataggaatatcaatattaataatgttaggattattatgtctttcatcactagtgggtattctttttcaaagttggcattgggctgatacaaatattattttggtttatattttagcagttttaatgacatcacgttttaccaagggatatttttatggaattatgagttcaattatttccactttcttatttaattacttttttactgccccatattacactttatctgtttatgattctaaatattttattactttcattgttatgactttgactgccattattacgagtgcatctacatcacgtattcaattatcaactgatttagctaatgaaaatgcacgtaatatgaaaactctttatgatttaacaaataaattatcagatttattagattatcaatcattgtcaaaagttgttattgagatgttttctgaagtgtttgattgtgagataggttttatttgttttcaagaaagtccacattatatctatttgttagggacaaaggacagtaagcatgaagaaatattagatgatttacaagagtatcagtcacagtttttgtatttaagaaagccttataaagaattaaatcagtgctatcactatcctatatatggtattcataaattattaggagttgttatcttacctaaagaaaatgtagaattaatgaatgataatacccataaattattggtttctatgattgaaaatgtatctttagctttggatcatatttattctataaaagaacaacttaaacttaaagaggcaacggttaaagaacgatatcgtagtaatttattgagagctatttcacatgatttacgaacacctttatctggaattatggggacatcagaaatgattatggatatgaataatcatcaagaggaaacttatcagttggctcatgggatttatgaagaagctaattggttatatttattggttgagaatattttaagtttaacaaaggtagaagaaggaaagcttgttattcataaacaattagaagctgttgaagaagtaattggaagtgctgtttatcatgttacaaaaaacaatcaaagaaagattgaagttcatgttcctgatgatgttttgatggtaccaatggatgctaagctgattcaacaagttattattaatttattagataatgcaatgaaacatacacctaaagataaaccaatctatgtggatgcttatgaaaaagatcaagaggcttatattgttgtggaggattatggaaaaggatttgaaaatcaaaatcctaaagagatatttgaaatgttttatacgaataatggaagcaattcatctgatggttcaaagggtgttggattaggattgactatttgtaaagcaattgttgaagctcatagtggtgagattcaagcagagaattgtagtgagcatcaaggtgcaagatttattgtgaaactaaagaaacgttaatttattcaaaaatttacactgttttggaaagctatttgctactcaaagcctctgtttatggggctttagaagcgatagcttttttttccgttttgttgaaatttcaacggtaagaagcaggtaagatgctagtaagcaacaaaattaactacacgattaatttttaagatgcacaagttgaaatagatgacttggttataaaataagtgtataataagtcttacaagaggagtcaatctccctacaatttagaatttatggaggatattttatggcttttttagataaattatttggaagaaaaaaacaagaaatgaatgaacaaattactcatcaaaattcaggtgaacaaaatgtattgaaaagaaataccattgtttttcagacagaaaaaagagaatttgtgtctgctaataaagtgcaaattaataaagataattttgataatatcaaacaaagatatattgcgtttgatgtagaaacaactggttttagtccttgcaatgacagaatcattgaggttggagctgttttgtttgaaaatggtatagcagtaaaaaaatatgggactttagtaaatgcaaaagttgatataccacctactgcatctgcggttaatcatatttataatcaaatgattgaaaatgctccatccgaaaaggaagtctatactaatttagttgagtttttaggggatgctttacaagaaaaaactataatttgtgctcataatgctaaatttgatatggattttttaacacaaactcttattagattaggttttaatgcaaagatatattatgtagatacactttcactatcgagaagtttggtaaagggtcttacaaattataagcaagagactgtagcaaaacattttaatttgataaataaaaatgcacatagagcagaaagtgatgcggaaatatgtggtaatatcctttggagtttattaaaattaaaggaaaaagaacaagaaaaaagtagaattgcaatgcaaaaaaataaaccttcaaaagatgaaatagaagtctgtgctgtgattcaaaatatgattgtttcaagaaatggggatgctgatttgcttggatattataagaatagtggaggatatattgatgtatcgtatctttataatataattaagtttaaatttgcaaaaaaaggtaaatatgtaattgttccaaggaacttaaaattgattgaaaagtttgcgaaagaaccttgtacaatgtctgaaggtggttctgactttgtaagaatattttttaattcacctcttgaattagaaatactaggagattacatttttaaggaatataaggctactcgcaaatctgcgttagattatcttaaatataataagagttatttagatgaatatatgaatggagcaataatgaacaattcactttctgcaagagaagtagaagatattttatcagatatatgtaataaagattataataatcagaatgttattatagaaattgaagatattataaacaaaatggatgtagaaattcatcctgtaaataatagagttcctgtttctgatattttaaatttgaacaattgggataaaggatttgatgaaggttatcctttgtggcaagaaggagaagaacgcagaaaatctggagatattgaaggggcaatcgatttatatgataaagcaagactttatggctattgtgcacctgttttatttgaatcttatgctatggcatttcataaaatcaaagattatgaaaacgagattgatattctaaatgaaggaattgatcgagaaggtaataatggcagaaatataagtcgtatgatatcacgcagagagactgctattaagatgcttttaaaacatagagaagttaaacaaaaaataaagaaaaaagtgataagcgagaattggtgaaagaagatagcaagtccgaggaaaagaaacctaaccaaaatcgaataggtagaccaatttttcaaatggatgatgatatgaatataattgagagatttgaaactgtttcagaagctgttaaaaaaacaggaatcaattctaaaagtatacgtgatgcagctaaaggagttcaaaaacatgctggaagttttgtgtggcgttatgttgatgaatatgaggaaaaataaatttaataaatactatagaatatctagaatgagttttttaaggtaattgtaatgagaaaggaaccacatcatcgacatggttccttaattttattaataggtaatatttctttatttccgtcactatattcaattgtaatataattctttttatagctgatcattgcggtattatcatttgtatcagttattctaatagcgttatcatcaactaattctaaagataagtagttcatatcgaagtggtttttaatccatttatataccttatattgagcaattgtatcacaatgcatattactcatcatctttaatgaaatctggatagtaaatactatttactgcatcaataagaatattcatatcaatgcgagtatagactttttcattcaatgacattgcacctttatgacctacaatgagtttattaaatgtttgactaatattagattcggcaagtaatgaaataaatgtattacgacaacaatgtggagtttgtgttaatccaaactgttccataattggcgtgaaataactgactgtgtaattactatatttgaatcgtttttgtttttctgtatggaatagataatctatttcagatgattcataccagtttttcataaagggtaaaatgtatttagaaataggtacttttctgattccatcaggtgtctttgatttcacaacatcaaagtattgttcatcaaaatgaatgtgttcttttttgagttgtagaaattcttcaattctaagtccagtgtaaattaagattaaaatcatttgatagtatttatcagatgataatgaccagaatgtatctatttcttttttagtaaatggttttctatcttcttgatttggatttttatctttatattgattaatatcaacatatttagaataatctttactacataagtcattcttcattgcgtaataataaagttggctaaataagattttaatatttttaagtgtaggatagtttttaccacaagtatcaatcgctttttgtaagtcaccagcttttaaatctctaaatgatttttcatataaaactggtattgcgttatatgctgctctataaccagtgattgaagatcgagatgcattttcatatttaatagatgaccacgcatcgtaaatctccctaaatgttagattgccaacttctaaattaaatggttgatcatgataatgtgctaacatttgaagtccttcttctcttgttcttgcataaccgataattccatatttttgaactgacttgccggttttctcattgatttcataaccagtagtaatacgaaccatataaggttttcttcgtctactagcattacccattttaactacaccaccataactattgggcgtttttaatttcttacttgttctcatctacttcaactcctttcgattggtgaacatatgttttaataatttttctcttgatttcattacatggatttttcctttgtatatcattgatgtttggatgtgaagtgatatatgtttctagttctttttgaaactcttgttcacataaacaatttaagatgaataaatcttttttgaaatttagtttgtctttaattaaatgaagatatgcttttggaaagtatttaattaaataattaattctttcttgagcgtaatctcctattggtagttctgcacctagtaggattggataatacacttctcctacaagtaaataactaagtccgtttttatcttctataatctttttcatgttttgttttctttctgtcattaggttcttgaataatctgttgaaatacttcatgacctaatgttttttttattttctgtaatgttttttctaaatgtttgtttctatcgaataattgatcaatttgattgtttaaatcatttatctttagtttaagtggaagaatggagttctttaatttatttacttgatttaaaagatttaaatacttcttaatcattttattgacagcggttttaataccattgataaaagggataacaatttttttatgataacttttcgcattcataagaacaggaggttcaggaatattccaaaaatcttcatcagttatttctttagtgaattgttgaaaagtttgttcttcctttttgataatagtcatttgttcttgaattatattgatattatcttggagttcttcttttgtagaagttaaagattgaatttgattattcaattcattaacttcttgactacgcatcttcttttggtactctaacacacttagatgtttatcgtgggttcctaattgtttccatttcacctgatatttttccatcacttttgcaagtgtttctttttcggataatatccattgattccattctgtatcactgcgaccattccctttaacaccttgctttgctagagcttgttttagagatacacgagtatctaatcctcttttgctttcagtaatataaggaataaaatcaatgtgtaaatgaggtgtttcttcatccatatgaagatgagcagaataaacatataaatttggatttctggtttggaaagtctgcatatattcgtttaatattttttcagcaagttgaccatttgatgattgagcattcatatcgtctttattaccgatttgaataattatttctttgaaaggtttctcttgtttacttgtacgaatcttttcgtagtaatttttgattttcctatcggaacgtgtttgtttgtcattgtattgtttgagtgatgtatcaaacaattgatgataagcatcacgaatatccatatatacatattcatgattaagaacagttctagaagaatctatattggaggcaataaattctcgtctattgtgatttacacttcctgttcctaacactacactaatacttcgagagatagtttcttgcatttaggatagcctcgcagagcgcaagcatcttttgtttatgacaaaagtgcatttgcgttactttcgacaaagtaacaaaggttaccaaccgaagaatgatgtttgcaacattgcagtctttataaactatgcattcttgcaatgttaatctttcaatgaccatacccacttaccatcaacctttttagatttgatatgaagttcagcttttgcactattcaatgttctttcagcaatatcttcaacttttgctaatttaaatatttcattagatggaataggaccatttgctaacgtatccttaaggaattggattgctctagatttctcggtttgtcttgttttctcagaaagtaattcatcaattgtaatgtcagatttacctaaccaagtaaatccattatctttactaagtttgaatgcaaatgattcacctttacaagccaaactgcttttatcttgaacaacgactctagtttctggattatctttaagttctccaacaaataaaatacttctagcagctgcaggtatatcaatagaaccaatacttttatatgtggattttccatttcctttatttaaatgaccaattaaaactatggcacattgatgttttaaagcaatgtttcctaatttctttagaattggtcttacttcgttagctcgatgtaaatcaacattttcaccgatatatgcttgtattggatcaagaataaatagttttgcatttaattgaataatggcttgttcaattctttcatcaagcatagataaagaagctatttcctcattgatataaaagatatgttcacaatcagcatcagcacttaataatctaggtttaatggtatctccatatccgtcttctgctgtttggtaaatgatattgataggttctcttttaaagttttcatcatcaaatggtaaaggttctcctttagaaagaagtgcagaaagacgaaggattaacatcgtctttccacctcctggatcaccttgaatgatagttagttttccgtatggaatataaggaaaccataaccattcaatttctgttgcctctacttgcgataatgatattaaatctagttctgttgaactcatataatattgtttctaaaataaccagtttcttcccaaacttttttatcaggacaataataattaaattctgtagaattatcctttttaatagcatatccaaatttcaaagttcctttttgtaacccaatacgaatatattgagcatcttttccaatagctttagcaagttcacctattggtacgtttctacctgtgaattgtggtagttcaatatatactcttttttcttccataatctcatgcctcctttaaagagtgtttgaatgtgaaagaaaagtttgttataatgtcaaagaaagagcattataaaaacagttctttcgatacatatggttcattagacaaagcttggtcgtggcgtctagtgaacttttttatttttctttagcaagtcatcacctcaattctatggcaagtaatatatctataccgattgcatttacttaccgcaacaataatatagcacgtgtggaaagtaattgcaacataaaatttaattttactttatttgccgatgaatatattgtataataacgatatagtgctcaatagtgaatggaggtagaacatggcttttgattcatatttaaaggatattagaatagaaaaaaatgttaatcaaactcaaatggctgaaattttagatattagtagaacagcaattaagttaattgagaatggatcaacaaaatatcctagtaagaaagtattacataacttagctatatatttaaatcaatcagaactagatgtgatggctaaaatattatttacagacaaatcactagatgataaatcatctgatgagtattttgtttgtagttatttaacgtatatgtatttggagggttggaacataaatgaccatccttatgtttatcctgtgtggcaagggaagagcattgagtttgatggaagaataacaaagaaacgccaaccaaagaatattatgattgttacaacatttaaaagagaattgtatagagttacgaccatctcaaataaagaagatgcaattggatatattggagatttaacttctaaattaatgactgtattagatgaatttagaggtgtgtgtttattgtttaataatcatattaaggaagaaagagattgttatgaagtttttaatgaattaatactaaaaaaaactatgtataaatttgagatggttttatttgattctgaaaatggaataattaaacaaatcagtaatttaaggaacaaagaataattatggaggaatatgatttatgttaatatcaagaaatgcttatatgaaagaaataaaaaaatttgttttagaaacagttgagtctgaagctaagttaaagacagtagattttataagagatggaaatataagaactcacatgttgaaatatataaacagcttttgtgaacctaataatatttcagaaataaaagaagcaggaaaattaaatgagaagtggtttaatgaatatattgaacaacaacgtaaattttaattaaaacactttgctagaagaagtatgttaaaaggagaaatattcattatgaagaaaataattttaagtttgattgtcatatcactaatgttattaggatgttcgaataatggtgaaaagaatgaagattcagtagagaatgtaacagatacatccgtttccaaaggaaatgtagagttagttgaatgcaatatttataaaatggatgaatcgggatatgcaggatatgatttaaaattaaaaaataaaacaactcaaattattaaaattgtaactgtttctactcaatttctagatgctgaaggaacaattctgaatacacatggaccacaagaattatttagagtatttcctggtcaggagtttgtagttaatgatgtatttgaatctaaaaatgtcgctaaaattatctttgatggttattcttattatgatgaaaacaataagtacattactgaagaaattacggatactaatcaagaaatatcgtttaaaataaatgaaagttatcaattttcatcatctacaacttatgaaaacactttattaaacaatgatttgaaaattggaagtgaagaagatttaatagttttagaaaatattgaagtcgatgaagaattatatgaagagtataaacactttaaagctaaagtaaaaaataaatctggtgaagatataaaagttttgacattgaattttgtatttttggacgaaaatggaaatatagttggttctacacatccgcaagaagaaactaagattagaaataatcaatcaattataattgaagggattgtaaatataaaaaaagcaaaatatgtatatttagatagttattcatattatgttgatgatgaatatgttcaaaactttgtctcaaatatagaaaaagcagttaaattaaaataaaaattagttgaaaggagtaatagtaatgtatgaatataaagttttaactcaaaaagataaatggtttactgggaaatttgatccattaatgctagaaaatgccataaatgcatatgctaaagaaggatggagagttaaaggtgtttcaactgctgaaattggtgcaggagtaggaagtagagaagaaatggttattatactcgaaagaaagattaatagtatagcagaagatttagatatggacaaattaggtgaactagtcttaccaaaaatttaaggggataaaagtatgaaagtaagcagttataaaaatatattatttattgaagaaaatataaatgttgaaactttaaataaggaacgatttgaaataaaaacatcaggatttggaaatcaattaaaaaatttaaatgatttaaaggaacaaatttatattaaaatagcaaactcatcacaaaaatataatgttgtttacaattttagatatggtcaaaaacaaaatattattgctttagatgatattgcgttttatgcaagtggagtattagctcaaataggaaatgaagattatgaaaaaataaaaaaattaatagattcatcttccttatcactacaatatttattaaagaatcaaaaattttattcaaatatgcctgttcaagtagataaagttgcattatataaaattaaaaataagtatgtaggtcagtgtaaactaattaatttttcggaagaagaaatacgcgaagtaaaacttgaacttcaatctgtaaattcatttggagaaatgagcgataatctaataacatgtagtattttaagaaagaaagaagattctaattttttatttggcgatgataaaacaatcgttttttcagaagaagacatttctaattataaatttaagattctatcagttcgcactgatgagaaaacatatatttataatgaagagaatttagattatattccaagggataagatattatcagatataatgaatgaagacgaatttaattatttgattgaaataaaatacaactctttatttaagaaaaaatctattcaatacaattctataattccattcaaatatggaaatatgatgatagattttgatggtgaaataagaaagcttaccgatgcagacaatttgtcaagtttcattaattatattgaaaatgatttgcatactgattacgaagcttatataaaactagaacaagaaaaagaaacagaaaggcttgaaaaaataaagatagcaacagaagagaaaaaacaaaaacaagatcgtttaaaaaataaaataagaactattttaaaaataggaataccttcaattattgtgttaatgctaatatttggaacaatcggtattattaaagaaaagaaagatgaaaatttatataatcaagctactcaatatattaaaacagggcagaactatgaagaagcaatcgaaatatttgaaaaattaggtgactataaggattcaaagaaatattatcaaactactaaattagcagttgaaattattgaagattttcagtcaaaaaattattttgaagcattaaaaaatataaatgtgttagtcgatgaggaatttgatgtagaagcatctattaaagatgtatgtaatgaaaatgtttatattgaagcagttgaaaattataataatagtaatttagatgaagcccaagaaatgtttaatgaactcaatgattataaagattcatctacttataaaaataatatagaactccttatcaattttgataaaaagtgggaagaaggagaattaactttatctgcttgtaatattgataacgtgccaaaaaattcaaaatatgaatataaaataaataaggttatagaagcaaaatctttttatggtaatttgataggtagttggaactatcctaatgaaaaatatcctactttttatgggactcttgtactaaatgatgaaggagaagttgttgcagaaattactccttcaagtcttgatggagaggtgacaacgatacaaacaattggtgagaaagaaaattcatcatttaaagcaaaagtggtatatgatagcgaatatagttttaaaataggcattgacgttttacttacaataaaggaagaacgtgatgatttttattcaaaagatgtgtattcactttcaattgagaataatgatacagttcatgatgatatttattttggttcagaagcatatagggataagtaatgtaaaaaatgagtgaagttatatgtcataagtaacaatattcttaatattgatgagtaaaaaatgattgaaagaatagaaatatcaaaagaggtgataggatgtttgaaaatgatgagttacttaggagattaattaattataactttaataatctaatcagaaatgatgtctccgtttctaaatttttagaaggacattttaaagaatatattgatgacgtcgaaaacggagtaactggaaagaatgatttgcttgataaaaaaataatacaagatgtatctaatgaattaaatgttttgcgtgagttatgtgaaaaaatcatagaggttatatcaacatttgaagctggtcatatcaaacaagcatatgataaagcctatgaattattgaataaacaccaatctttattacttacaaagaaacttgatgatcaatgcttacacgttttttcaagaataaggcttggaaactttaaggaaaaagaaaaatcagaattatttcacattccaaaagacaaaaataatttaattggagggtatagatatagtgttgctggatttccttgtttatatctttcaaatagtttagaactatgttggtatgagtgtaatatgccaaaaaaatttagtttttgccagatgaagattgccaaagatgagaaaattaaattattagattttacacaaagaccaatggatttttttagttatcagattactaactatcttaattatttacatatttcaaaagaaaatcagataaaagcaatttctttccaaataaaaaactatatattaagttatcctattgttgcttcttgttccatgatagtaaaagataggggaaataaatttgtaccagagtatattatgccgcaaattttaatgcaatggatacgtgaaagcacagatgttgatggtgtaatgtacatgtcttccttaaataatagtttgaataagggcatgggtgcgtttaatattgcattaccatgtaaattatttagagatgatggcttgtgtgagtctcttacaagaaaaatggaggtttctgatatagagtatattgatattattgaatattttaatcagcaaaagaaaaatctacttgatgaaatatcaaaattaaagaataaagtatggatgtttatgattcattcaaagtgtaaaggtggatatttgaatcaaatgattgaattatgcgattatattaatataacttataaagctatattggaagataaatatgttaatggtgaactcattttcaattttattaattgtatggatacattcatcagtttctttaagagaaataaagccatgatcattgaaaaaacaattattaaagatggactagaatttgaaaaaacatctgagcaagagataaatactttaaatgatttatatattaaatttgtagaattagctgaaacaacggttaaaagaaatcaaatattttatatgacttcatcatctggacttttaaaaaattttactaaattataaaaaataaagtatttaatagtgttgaattgctctgtctaagatacaagtaagatgcaaaagtatcaaaaaacgtccatttcatcgcatatactaattaaagaaacgttaatcaaattattcgtaaatagttatctagaacatggattttatctatgatctttgtatttataaaaaagcacctaatttgttttaaatcacctaaaataatggtacattgtattggattagtgtattattaaatcgataaatggtagtagtgatagcatttattaatttggtaatttaatagagtatttagactttgtgagaagtttagatacttctttttttcttttgaaattaagggtatagtataagagcaaattaatttataaataacaaattatagaaaggatctttgaatatggatgaacttatgtatagtgttgatttggttgatgaaataggtaatctaattacaaatgttagaaataatgttgtaaagaaagttaataatgaacttttagaaataaggtcgtgttatagttgaagatgaacttaagaatgaacgtggagaatatagtaaaaagcaacttatttcactttcaaaaactctcacaaaaagatttggaaaaggattttcgcgagtaaatttatataatatgaagatgttctatacaaagtatccaattatccagtcagtgactggacaattaagctggactcattatttgaaagactattattatcaaatggtaaagcaaataaagaaactgtacttcaattaactcgaaaaggaaatgaaatagaaaagcctgaagatattgttaaagaaccatatgtattagaatttttgggattaccagatgataagcctattatggaatcagatttagaaaaagcattggttaggcatattgaaaatttcttgttggagttaggaaaaggatttatgtttgttggaactcaacaaagagtaacgttattcaatactcattactatgtagatatggttttctacaataagatattacgatgttatgtacttattgaattaaagactacaaaacttatgccagaagcagtaggacaattaaatatgtatttaaattattatagatcagaagtgaatgatgaaacagataatgatcctattggaatcattttatgtactgataagaaaaagtgtagatgcagaatatgcattaggaggactatcaaataatatatttgcatcaaaatatacttattatattccaaataaagatgaactaatcgcacaagtagaatcagtacttgatgaaatggataaagagtagttagttgtgctgaaatgctttgattaagatacaagcaagattaaaaatgttgattttattgcatctctaaattaatgtagtattaatcatatattcatagggggagatattaagattgtagattttctctatggtctttttataaaagttaaaggttattttgttaactcaagtagataaaggtagtttgagatttgttagaaatagtttatatataaatagacaatcaaagaattaacaacaaggctaaatataatttaattgtaatatttaaaaaatattacaaatgaagatatgactgctatgaattattagtgaattagctaataatttataattgttagtaatataactaataatggttgatttgacatttaaatggttttgtcataaaaattgtttcaaagttaaatctcattattcaattcataaaatataacttttatatagaaatattctactatatcaggtttgaatatttctttttgttttctaattatagaataaagagtataattaaaaaaagtaatcttatcaataaattatggaggttaaatgatgagtcagagaatattggttgttgaagatgatacacaaataagaaagtttatttgttattgtttagaaaacaatgattatgaatatataactgctagtaatgggattgatgctttaagaaaaatagccaatgaaaatattgatcttatcttattagatttaggtttacctgatattgatggaactgatattattaaaaagctacgagaattttcagagatgcctcttattgttgtatctgctagagataaagatcaagaaaaagctgatgttttaaatctaggtgctgatgattatttaacaaagccattttcagcaactgaattgatagctagaataaaggtagcttttcgacatttctaccgatttactcaagttcaaagacaaacactttacaaagtgaaagatttatctcttgatttagataagcatcttgtttatttgaataatcaagaaattcatgtaactccattagaatatcaactcctaacattatttatgaaaaatgttggcaaagttttaacaacaagtcatatcattgaagaaatctatggaaaaggttatggaaatgatacacaagaattaagagctttaatggcaggtttaagacgtaaaattgaaaaaaatcctgcaactcctgaatatatattgactgaaataggtgtaggttatcgaatgaagtcagatgaagaataataaaatagaccatatattaaaagtcaaatgaattcctattattatcaataggaatttttcttttctcacacgattctcacacctttttatatatcctcacaccatcttcacaacaatatttctataatataggtgaaaaggaggagacggattatgaaggctcaccaggatttagaagaatatcagactctagaaaaattaagtcaagaaatcagagccattttagatgatgaacaagtatgtctaaataaaatcaaagaagcattagtactttatccagatgctccacaaccacaaaatttattaggcattcttgcagaaacaaaagaagataaagttttagcaatgaaacattatcgagctgcttgggcattagctccttattaccgtccatcacgtgaaaatattgatcgtcttgtagatatgcattattacaaacattactacttttgtgatcaagatgtagatgaaaaggataggcaaaaagagacaataaaatttaatatgttaaggaggaaactaggatgatggaattttataagaagttagaaaataaaagaatagttattatgggatgtgggagactaggtgctaatttagcagattatttatatgaacaaggacatgaagttattgttgtagatagtgatgaagatgcttttagaaagctatcagcatcttatggtggtttaacatttattagtgatgcgactgaattagagacatttgataagttagagattgatgaacagacaacaatgattgttgtgacagatagtgataatacaaatattttaatatctcaagtcgcaagagaagtctatcatgtgaaaacaataatatgtcgtttatatgatccacaaagagaatgtgtttatgatgaatttcatattgatacaatttgtccaacatatttatcagtgcatcgtattgaagatattttaaaagagagaggggcataatgatgaaaaagaatgttttgttagttggtggacttcataaggcaatgtcacttgctcaatcgttattaaataaaggatatgctgttacagttattaatgataattataatgattgtatgactttagcgagtattgaggatttagaggtgatttttggtgatggaactaaaccttttgtattagaagaagctgatggagaaaatatggatatagctatagcgttgacaaataaagatgatgataatttagttatttgtgaattgtgcaaaaagaaatttcatgtgaaaaagacggttgctttggtaagagatccacaaaaaacacgcttcttttatcaaatgggaattgattcagttgtttgtgcaattaatgctattactggaattattgaacaacaagcttttattgatgagatgacaaatattatttcagtagaggatggaagggtcaatattttagaattaaagattggtcatcatatgccttcagttaataaaaagttatgggaaatagatttaccatcagaagccattattggttatattttaagaaatgatcaaggaattgtacctagaggagataccagaatattagctggtgatacattgattgttatttgtgatcaacatgttcaacaaactgtaacaaaggagttgacagggagatgaataggatattcaaaagtaataactattttggtcaattcttaattttaataggaatattattacttataccacttataacagttatcttttatccagaagatatatctcaaatgtatgcttttgttattccagcagtgtgggcaatcatcttaggactatgtatttgttatataagaccaaaaagaaaatctccacagaattggcgaagctctattcatgaaggaagtttaacagttttatatgcctggttaataggaattattcttggagctatgccatttgttataagtggacaattgacatttgtacaggcactatttgaagctgtaagtggttggacaacaaccggattatcagttgttgatgtaacaaaggtcaatcatttgtttcagtttcatcgttgttttatgcagttttgtggtggacttggatttattatgatgattttattctttgttcaggaaaatcaagcagcaaatttatataatgctgaagggcatccagatcgtttagaaccaagattaattaatactgtacgtatgatttttggtatttattttgtatcattagttttaggaagtatcttgtattatatttttggaatgaattggtttgatagtatttttcatgcgatgtgttcactttcaacagggggattttctactcaggttgatagtattggagcttatcatagtattgcaattgaatgggttacaatattattaatggttattggaacaactaattttgctgtattattattgatggtgaaaagaaaatggcgtgaagttgaaaagattagtgaattaagattgtttactgtgcttgtcattatttctacaatacttatcgcaatgatgttaagttattcactctatttatctattggtgatggactaagagtagcagtctttaatgttgtttctgctttatcaacaacaggttatgcaaccatgtcttatcaatcatggccaaccacagcagtctttatacttattattttaatgattattggtggaggctatggttcaacagctggtggtatgaaattaacccgtgtttatattgcatatcaaactttaaagaaaacatttagagaaaagatttcatcaaaacgtagtgttaataagatttatcattatcgtgcacaaggtcgaacagaaattaatgcaacccttatgcaggatacaatgagttatattttgatttatttgttaatttatgttgtgggaacaatcttaatgagttactttgctcagtgtgatttacagagtgcgatgtttgaatttgcctctgcattagggaccgttggattatctattggcttaactggaccacaaacatcagcgattgttttgattattgaaatgtgtggaatgttattaggtcgacttgaaatctttgtcgtctttataggaatcagcgcaatgttttataaagcaaagaaagtatttataagaaaaaatcttatttaaatgaaaaaatcagcttattatgagctgatttttaaaaatatataaattatttatgagtagattgttcttcttgatgatgaacacgacttaaatattcaacagtatctaatccagaagaatgtttaaaaatatatgtgacagcttgtaatatatagtccataaaaattcctcctatcttttattattagtatagtcaataatttataaaaggattatttttttctataatagaaatcattttctttatttgtaaaactcataagcaaattgatgatactataaaattatgataagataaatacaacatattaaggtttatcaacaaatgatgaaagaagaataaaaatgaaaaaaactaaaatatttatagaaaacttttttaatccacttatcactggaatgtgggtaatattaatatatcaaatttatcaatacaaaagatatcaatcttataattatattattgatatcattgttttaggattgatattatttgtctggttattaacaagcctgattcttgcatttcaaaattatagtgttcaatcaaaattatgccatataaaatatgcatctattattggggttatcatagttattgggagttcttgcattttaggctttcaatcatatcaacgctataacgatcaacatttctatgataataatcctaatgattatgtacttaatgatggtcattttcaaactgagataatcgataaaatagaagaagaaattcaagagattatacctgataatgcacaagcatatgtttgcccatatacttattttgtatgtaatgaatcaggagtattggatgcatttgaaattgaaatatattttgaaaaggatgataatgcttatgttttagggagtcgatataaaaaaggtgaaaatgttaaaaatagatttatgaaaattgattatatggaaggaagtgaatatcttccacaaatgagtgatttggttaaaactatttataatatcaacttaccaaataaaacatgtaaaattcaaatggaatcaactaatgatgaggcttattttaattatgaattttatccaatcaattataattataaactagttattttatagaaaatatctataaataaaataaaataacaatcaagatagttagaaatcactatcttttttttataaatgttttatattgattgataagttagtatttattttatatgataaaaatataagattaaatctttttaggaggtgtagatatgaaaaaaatagttatattttttttaagaattattattgtttttcttgtggtctatgttttttgtacattcttattacaaagttgtagtcctgatgtgaatacacttgatgaatatacaactattacagatttcgaaaaaaattcaaaactaaaatattacaatctctatgattttgatatattttacaaaaataatcaaaaaaagttattaaaagatgaagaaatcattttgacatttgataatgaatacaaacagaaatatatgatcacaactacatcatcaaaaatccaatataaagttgattatggtttagaaaatatgggagaacaggattatcagatggaaaacatgaatggtgttactatctatggatatacctatgataatgaacaaaaatgttcttttacagttagatataatgactttcaatacagtattgaaggagttgaaaatcatgattttcaggattgtatgaataaaatgaaggactatgttaaacttaatgaaagtatgaattgatgttaaaaaataaatatatttatttggttaaagacaaataaaaaatattaattttggttttttcaaaaaatgaaataaaaaaagtgttgacaaataagttgtgacactgtattatagacgcaagttcaaaaataaatcgttgagcagaaagagtaattgattgaacgcttatagcgaggtaacacagagtggaaggttactaagtagaagtcaatgaagcgcgtctgtgagagtccattggaactaaaagtataatggaacgtgacctgcgttaaaggaaagagtggttagaagatttctaacaacgagagtggtaccgcgtatatatacgtctctggagtttttccagaggcgtttttgttttatgggagggtgatgaaaatgcggcgattagggagatatgattcataaatataacaaacacaaataaattaaaaaaagaggagaaaaagattatggaaaagaaacaatataaaaaagtcgtattagcttattctgggggattagatacatcaattattattgcatggttaaaagaaaattatggttgtgaagtcattgctgtggctggagatgttggtcaaggtgatgaacttgaaggattagaagaaaaagctttagctacaggagcttctaaatattattgtgcagattgtaaggaagaatttgttaatgattttatcttcccggcaattaaagctaacgctatttatgaaaataaatatttattaggaacttcacttgcaagaccaattattgctaagaaattagttgaaattgctaaagctgaaggagcagatgctatttgtcatggatgtactggtaagggaaatgaccaagtgagatttgaattaacaattaaggcttttgcacctgaattagatatcattgctccttggagagtatgggaattaaagagtagagaagatgaaattgaatatgctgaggcaagaaatattcctttaaaaatcaacagagaaacaaactattctaaagataaaaacttatggcatttatcacatgaaggattagatcttgaaaatccagctaatgaaccattatatgataagattcttgaattaggagtaacacctgaaaaagctccagatacaccaacatatattacaattacttttgaaaaagggattcctgttgctttaaatggagaaaaattaactggaattgaaatgattgaagctttaaataaaattggtggagctaatggtattggcattgctgatatggtagaaaacagacttgttggaatgaaatcaagaggggtttatgaaacaccaggtggaacaattctttataaagcacatgctgatttagaagaaattacacttgataaagaaacacaacattttaaacaacaagtggcattaaagttagctgatattttatataatggtcaatggtatacaccactcacaaaagcattacttgcctttgttgatgaaacacaaaagagtgttaatggtgatgtgaaattaaaattatataaaggaaatattattggagcaggtatgacttcacctgatacattatatagtgaacaaacagcttcatttggtgaagatgaagattataatcaaatggattcacaaggatttattaacttatttggattaccaattaaagttaaagcattattagatcaacaaagaaagaaataaggggatgagattatggcgttatgggctggtagatttaaaaaagaaatcaatgaaaatgtcaatgcatttaattcatcaatttcatttgatgcaagaatgtataaacatgatattatgggtagcattgctcatgcatcaatgttatgtaaacaggggattattgatgaaaagagtttaaaagacatcttaacagggctagatgaaatattaaatgatttagaaactggtaagttattatttgatccaaatgcagaagatattcatatgtttattgaaagtgaattaacaaagaaatatcctgtcagtggaaagaaactacacacagcaagatctcgtaatgatcaagtcgctttggatttaagattgtatacacgtgatgaaatgaaagacgttaaacaaatgcttattgatttaatcaatgtgattattgaacaatctttacaacataccgaaacaattatgtgtggctatactcatttacaacgtgcccaacccataacctttgctcatcatttaatggcatatgctcaaatgttttatcgtgatatcacaagaattgatgattgttatgaaagaatgaatgtgtcacctttggggtcaggggcacttgcgacaacaacttatccaatcgatagagaatttgttgctcaacaattaggaatgagtggtatttgtgaaaattcattagatggcgtaagtgatagagattacgcgattgaatttgcaaatgctttagcgcttattatgatgcatttatcaagatttagtgaagaaatgattttgtggtgttcatgggaatttaaatacattgaattagatgatgcctatgcaacaggttcaagtattatgccacaaaagaaaaatcctgatattgcagaactcgtcaggggaaaaagtgcgagagtcatcaatcatgtttcatcattactcacaatgatgaaaggcttaccgcttgcttataataaagatatgcaagaagataaagaagcattatttgatgcgattgatcaagttaaattatgcttaccagtctttacagatatgttaaagacaatgaaagtgaacacacaaaaaatgagagaatttgccgcaaaaggatttatcaatgcaacagattgtgcagattatttagtgaaacatggaaaagcatttagggatgcttataaaacaacaggggaattagttgcttattgtattgatcatgattttgtcttagaaacattaccattagaagtttatcaagcacatgataaggcatttgataaagatatctatgaagcgattgccttagaaacatgtgtgaataatagagtggttgatggaggtccatcaccagaggcagttaaaaaacaaattcaaaaaatgcaaaagaaagtaggtgctttatcatgataaaagtaggaattattggggttagtggttatgctggagcagaacttttacgattattattaaatcatgatgaagttaaagttgtttctattggagcaagaagttatcaaggacaaccaatatcagatttgtatccatctttttaccaagtatgtgatatgatttgtgaaagtgatgaagatgttttacaaaaagctgaacttatttttgcttcattgcctcatggtttaagtgaaaaatatgcaaagtattgtgatgaaaataataaaaaattcattgatttaggggctgactttcgattagatagtgaacaagattatcaagaatggtataaattggattatcatgaaaaagcattacatgataaacaagtctatggtttaagtgaagtgaatcgtgaaaaaatcaaaacagcgactcttattgggaatcctggatgttatccaacatctattactttaggattatatccattattaaaagaaaaattaaacttgaataaacatatcattattgattcaaaatcaggaacaacaggagctggaaagtcactcagtgaagatacacattttccaaaatgtaatgaatctttccatccttataaattaggaactcatcgtcatacaccagaaattgaacaagaattgtcaaaaatggcaaatgatgatattcaagtcacatttacgcctcatttattaccagtcaatcgaggaattgtttcaacaatatatgttgacttaaaaccagaagtctctttggatgatgtttatcaaatatatcaaaactattattctcaagaatattttgtaagagttttaccaaaagggaagattgcagatttaaaatttgttaaatattctaacttctgtgatatttctttacatttagatgaacgttatcatcgtttgatcattgtttcaacgattgataatatggttaaaggggcagcaggtcaagctattcaaaatatgaatattatgtatggattagaagaaacaaaaggattaaagatggtaccaccatctttctagggggaaaagaatatgaaagatatacaaggtggagtttgtgcacctttgggatttaaggcaacagggattcactgtggtattagaaaaaataaatcaaaaaaagatttagctttaattgttagtgatgtgatgtgtcatgcagcaagtacttatactttgaataaagtcaaaggagcacctattgcagttacaaaacaacatttattaaatggtgaagccaaagctattatttgtaatagtggtaatgccaatacatgcaatccaaatggtgaagaaattgcgaatgctgtttgtggactatgtgccaaagaattaggaattgatgaaaatgatattattgtcgcttcaacaggtgttattggacaacctttagatttagcaccatttgaaaatcatatgaatgaacttgtacaagcgcttcatagccaaggaagtagtgatgcttgtgaaggtatcatgacaacagatacagtcaaaaaagaatatgctgtagaatttgaaattgatggtgttacttgtcacattggtgcgattgctaagggaagtggaatgattcatcctaatatggcaacgatgttagcattcgtgacatcagatgtgaatatttccaaggaaatgttaaatgaagttattcatgaagttgttgatgatacatttaatatggtcagtgtagatggtgatacatcaacaaatgatatgttaagtgtcatggctaatggattagcaaataataaagaaatagtccaaaaagatgaaagttatcatatatttaaagatgctttaatgtatatttgtgaattattatcaaaagggattgctaaggatggagaaggtgcaacaaagcttttgacttgtcatgtgaataacgcttgtagtcaaaaagatgctaaggttgttgcaaagtcagtcattacaagttcattgtttaaagcagccatgtttggtaaggatgccaactggggacgtattttatgtgcaattggatattgtgaagcatcatatgatgttgataaaatcgaagtcacactggcaagttctgcaggaagtattcttgtttgtcaaaatggtaggggatatccatttgatgaagatcaagcgttaaagatattaagtgaagatgaaattgaaatcttgattgatttacatgatggaaactatcaagctacagcttggggttgtgatttaacttatgattatgtaaagattaatggggattatagaacataaaggggaagatcataatggataaaaattcaattgttaaagcagaaatcttgtcacaggctttaccctatattcaaaaatataacaataagattgttgtgattaaatatggtggaaatgctatgattaatgaagaactgaaaatgaatgtcattaatgatgttgttttattatcagaaattggtgtgaaagtgattcttgtgcatggaggaggtccagaaattagtggaactcttaagaaaatgaataaggaatcaaaatttattcatggattaagatatactgatgatgaaactattgatgttgttcaaatggttttagctggtaagacaaataaagacttagtgaaattgattatgcagagtggtggcaatgcagttgggattagtgggattgataaccaattgattgttgctaaaaaacatgaatgtgaagatgatttaggatatgttggggatattgataaaatcaatcccaatattattttagatatgttagaaaaaggctatattccagttatagcaagtgttggaactgatgaggaagggcatacctataatattaatgctgatacagcagccgcagagattgctggagcgttaagtgctgaaaatatgattttagtcagtgatattccagggttattatttgataaagatgatgaatcaacattgattccacttgttcatgtttatgaagttaaagggttagaagataaaggaattattagtggtggaatgattcctaaagttgaatgttgtgtgagagctattcgtcaaaatgttaaaaaagcagtcattattgatggaagaataccacattcaatattaattgaaatgctttctaaagaaggtattggaacaatgtttaaaagataggaggcatgttatggttaatttaaaaggaagaagttttttaacattaaaagattattcaaaagaagaaattagatatttattagatttagcacatcaattaaaaaaagcaaaaaaagcaggaagaattgggaaaacattagaaggtaaaaatatagttttactctttgaaaaaacatcaacacgtacacgttgtgcttttgaagtggcagcccttgatgaaggtggacatgttactttcttaagcaattctcaaatggggaaaaaagaatccattgaagatactgcaaaagtcttaggtagaatgtatgatgcgattgaatttagaggttttaaacaagaaacagttgaagatttaatgaaatattcaggagttcctgtttataatggtttaacagatgttgaccatccaactcaaacattagctgactttttaacaattgaagaacatttaaataaaccattaaatgaagtaaagtttgtctttacaggtgatattagaaataatgtttgttatggattgatgtatggagcagcaaaaatgggaatgcattttgtttgtttaggaccaaaatcattacaaatcgatccagaggttcttgcttattgtcaacaagaagctatgaagtctggtggtaaaattgaagttttagataatgttgatgaagcagtgaaagatgctgatgtgatttatactgatatctgggtaagtatgggagaagatgaatctttatacaaaccaagagtagagatgttatcaccttataaagtcacaatggaaatgatgaagaaaactggtcaagattctacattatttatgcattgtttaccttcattccatgattttgaaacagaagttgcaaaagctaaaaatgagcaaggtattgatattcgtgaagttgaagatgaagtgtttagatcagaacattctgtggtttttgatgaagctgaaaatagaatgcacacaattaaagccgtcatggtagcaactttaggaaataatattgatttataaaaaagaagaattaaaaagagttaaaattattttgtaaaaagatatcgagaggaagtagaatttatgaaaatctatttcctttttttatattatatatataatatatttaaaaagaggaaaagataatgaagaaaataagaatgtttgtatataattttataaatcctattactattattctttatggaacgggtttatattatttatatagatatagtactcaattagtgtatcatgaattttatgagttattggatatattatttattctactagggataggttttacattattaatatggttcttaactagtttagtactagcttttcaaggttataaagttgaagcaaaaatatgtaatttgaaatattttagaataatagggatggtaattttaattgttggaggaataattttttctgctaaacttacagattatcataatactcataaagatacctttaaacaatgtgaatatacaatagatttacaattagatgaagtttattcaaaaaaagaatggttagatatagtcaataaacaaatacaaaatatcattccatcagacgaaaaaatatatatagataaatcttcatttatacaatgtcattcatctggaagtattgaatcttatgatttaaagctatactataataaatataaagatagttatgttcatcattttacctattcatattcaaaacttcatgtaaaattatatagagaagcatatggaatgattatagaaaataatgctagatataacgattttataaagagtattcaaaaaataactgaacctaaaaacaaatatgaattatcacttgttagtacacctaatgaaatagaacatacaaaatactataaaattgatgataataactacctacaactaagaataataaatgatactgattttaataaataatttatggaataaaaataattttatgatataattataatataaagagaggtgaacttataatgaaaaagaaaaaattaagtattgtgattgtatctttattattgatggtaggggtatacggatgtcaatcaaagaaagaatcaatgaattatgaaacagttattaaagatgttatcatgtattcacaagataatcttgttgctatggaaggtaaaacaccagaagaagtattaaaaatgtatgaagaagcagataaagatattgatgaacgttttggtcaaacttttacaaaggaagcattaaatgatttgaaaataaaagatataacaaatatacaagaaaagctttctcattataccttaccaattgaaatatctaagataatagtcaaagaagatactacaagtacagtaactgttcaatttgttgaccatcaaaaaaaacatggtgaaatgatttttagagttcaagatacaaacaatgaaataaattattttgaaatagaataatataaaattattttgtcatgtaaaaaagcccggattgggcttttttattggtaatagatattttgttgatttaaacgaacggatttaatttttttaaaatttctaattaaataaatagcatatgataaatcattaattgttcctaatatgataatacaactacataggccaaatacttttataaataagagttgtgtacaagtataatataaatatatagttaatattgcgataggaagggcaataacgatatttggtaataaaagtaattttatatatgattttggatttttttcttctatacaataagtcatcatcataaatcctttataccaaattgttacattttgattttttgaaaattgcatagcatgaagatattcgtgaataatcataagtaaaacaacgataataagtccaataatatcaccaaataatatatttgaaacaggacctttatatggccctattagtaaacgtagtccacagtataaaggaagaagtagaatgcaaaaagtaaagaaataatctaaaaaatttctctttattttatggtaatgtgatatatcagctaattctaataaattatcatttttcaattttcctttaaaacgaatagccatattgatcccttctttcatatatattttatcatagagtagctgtctttactatcgttagatatatataaaaacagtaattcatattaaaatagaaatttaaattagtgtggggtcaacccttcggtctacaattccgtggggtgtccctttttttatctctaaattttaaaggggtctccttcatattaaaaaaatcctttcatgatatgatatttttgcagaaacaaccatatatgaaaggaaagttttaactcatggattatgatactataaatttacttggtttacaacctgatgatattcaagatttaaacattgcaagaactgataatactgtttttattaatgtcactttatccagaaaaattaagccttgtccctgctgtggcagcttaaatgcaaatatcaaggattacaagattaaaaaaatcactcattctattttcaacacaaataacacctatatcaattacagatgcagaagatttatatgcaatgattgtcataagtcttttcttgaagataatcctttcattgctgctagacaaagaatttccaacgctacaattatacaggttctcaaggactgtaagagattgaattatacctttacttctattggtgaaaaaaatcatatctctacttcttctgttgtcaatatttttgatcaatatgtcaccatgcgtcctaacccacttcctagagttctttcaattgatgaattttatctaggcagaacctgggataataaatttgcttgtatcttcattgattgggaaacaagtcagattatcgatatatttccaagcaggaaaaaattcaagctctattcttatatgcagtacatcaataaaagtgaattcaataatgttaaatatgtaagcattgatatgaacacaacctacagagattttgcctatcatcattttaagaactgtattgtcatggtcgattcatttcatgtcgtaaaaaatattaacgatgcattaaagaatgtacgaattcatgttatgtccaagcaagatagggacagcgttaattattatttgctgaaacattggaatcaccttctcatgaaacgaaaaggagacattgaagataatattcctcaatacaataagaaaatcggctatgccataaacaagcctcaaatacttgaattgatgctcaagattgatccattattaaaaaatgcatatgaatggaaagaagactatcttgacttcaaccaagactatacatataaaaatgcagctaagagatatgatgaattatataatgaattagtcaagttgaatatgaatgagtttaaggatgttgttggatttttaaaaaactggagaactgaaattttgaattctttcattcttattggtcaaagaagaatatcaaatggtccaatagaatcaattaacggaagaataaaagttcttttgaaaacatcattaaaatataagaactttgaaagattaagaagccgtataatgtactgcataaataaagattccttacctctattgacaaataaaaagaagacaaatagagagcctggaaaagaaagaggaaattataagaaaaataaagaataatcgttagaaacggttgtttctgcataataaaagtatcattcttaaccccatggttttgaatgatactttattcactttaaacacatgtggggtcaataaaaccccacgttatttttgagtctcgtttttacaaaccccgcggaaatttagagacccattaaaattactgtttttatcatattattcaatttcaattaattcatactcacgtgtccctaaaccaatcttttcagcatgttctagacatgatttccagtttgtttcaggagatacatctgtaaagtgatcatgatgatcatgaccatgtttatctaataaactatttgctatagtaggttgtttattaactgcatcagcacatgcttgatctaatgctactgggtcaaatgatgcgaacattccaacatcaggcacaatagcaatatcattttcactatgacaatcacagaatggtgatacatcaataacaagtgagatatggaaacaaggtctaccatcaacaacagcttttgcatattcagcaattttacaatttaaaatatcatttgcttcatccatgcttgcttgaatagcgtctttaggacaaaccccaatacaacgaccacaaccaacacatttgttatgatcaattgttgctttatgatcagtaatactaggtccatcatgagcacagattttaatacattgaccacaacctatacataaatcttgattaactgttggtttaccagcactatgcatttccatcttaccagcacgagaaccacaacccataccaagatttttaagtgccccaccaaatcctgttaattcatgacctttaaaatggcttaatgaaataacaatatcagcatccataatagcttgaccaatttttgcttctttgacatattcaccattaataggaacaagttcctcatcagttccttttaaaccatctgcaataattgtatgaacaccagtttgaaaaggattatatccattagtataagcactgtctaagtgatccaaagcattctttcttccacctacatataaagtattacaatcagttaaaaatgcttttccacctaattctttaatataatcacaaacaactttagcataatttggtcttaaataagctaaatttccaggttcaccaaaatgaatcttaaccgcagtaaatttatcattaaaatcaatatcttcaaatccagctttcctcatcaaaaattttaatttctcaagtaaattcattctaccagtagcatgcatatcacaataataaactttagatttttccattatttttcctcctttacctctcatctagttctattttatcacttagagtttactttatgtcaagatatttctaaaatatgatataattctcttgatagtagagtcaatcgataggcgatatgttgttaatctttctatgagatatataattttattgtctatagtagggatattatggataataaaaaaatagaaaagtatattgcattaaagagaaaacaagtaggaatgactcaacataatttagttgataatttagcagttacaaataaagctatatcgaaatgggagacaggtacttgggtaccaggcatttgattattaaaagaattatcaagagttctaggggtaacaattgatgaaatattagaaggagaagattctttatttactatacataaagaatcgaaacacttttattcattataggtgaatttgctatttattcattgctttattatgcaggaaatataaatgttatagaagctgttattatatttttagaggaatgatatggagaaaacttaaaatacatttaagtcaagatgaagatttattagaaaatatagaatctattcaaaactttattaatgaaatacaagatatagcatataatgatcaaaaatataaagaattcaaatcaaaaaacaatatatttaaaactaatacaacatctacagattattttgaaataacaagacgagcatattttgagcaatatgcaaaaccagatgcttcaggtattaaagtcgatgaacaaatcacaacaattacagtagaagcaagtactattgatgatttcttttcgttaatgtaaaatcaaagggaacttattcatcaataataaaatgtaatctatgattactaaagatgtttcaaatgatccaatgtatcactatacaaaattaaaagagaagatagaatatttttctttcttctcttttctattgttataaattttctgaatatttatttatccaatttcacccaaaaatttttatcatcaggattaatagggactccattttcatcaaattctaaagttgcttcttgaacataggttgttctatatccaaagtttgcaaactgattgacatagtattgattgttataatatagcataacagctgatgcattacttccggcacttcctttcgtatcagcaagaagaataacagtaccgtcttttgcatacattggtttccaaactaaagcgttagggtctccattatagttaccatcttttagtgttttttgttcttcttcattaagctttggatattgaccattattttgttctttaaaagctttttgtaatttatatgaccatccaggttttttactagattcaccattgttgttatttccatttacatcagctttgatatcattttccttttcaagcttattagcaagttgcatcatagtttgtgcggatttaaaataagaaatttcttcatcatcaataatcttatactcattattttcataaagaactaataaaccattagaagccttatataatatctttgtcacttctttattcttaacatctgtttctaaaatacttccacctttatcaacaaaatcttcaatccattgattatcagcttcatctaaagtgatctcatcatcatgattttgtgaatatttttcaataactcttttttgagcggcagttacaatcgcatggcattctgtcagtgctggagcctcttgtgcagtattcaaatattttaaaaccgaaggaacagcaactgccataagtacagccagaataacaacaacaacaataatctcaataagagtaaagccttttttgttttttctcataatattgctcctccttttttacgtaatataacatttttgtcacaactttacaaatgagacagttagattttttcaaagtttatttcttttcacaaaaaattcattataatagatagtagaatatggagggtaaaatatggaaaagagaaagtttgataagttgaatattgaatcatctttgttaggatttggatgtatgagatttccattagatgaaaatggaaatattaatgaggtagaagctgaagaaatgattgatttagcaattgctaatggagtgacttatattgatacagcatatccttatcataatggagatagtgaaccatttgtaggtagagttttaaaaaagtatgatagaaaatcatttactcttgcaacaaaattacctatttggaatgtaaatagtcaacaagaagcaagagaattgtttgaatcacaattaaaaagattagatgttgattatgttgatttttatttattacatgctttagatgcggataaatggaaaaaggttttggattatcacattattgaaatgtgtgaagaattaagaaatgaagggaaaattaaatatttaggatttagttttcatgatgaatttaatgtatttgaagaaattattaaatatcatcactgggatttttgtcaattacaattaaattatatggatatgggaatccaagctggtcaaaaaggtgtagacttagctaatgaattaggtgtccctttggttgttatggaaccaattaaaggaggatcactagctactttacctgaagatgtcacacaaatgtttaaagattataatccagaagtttcacttgcatcatgggctttacgttatgtaggaacattaccaggtgtaaaagttattttaagtggtatgtcaacattagctcaagtgaaagataatttagagacttttaaagaatatcagaatttaaatgaagaagaattagcaattgttaaaaaagtttcagatacacttcattcacgtatgaaaaatggatgtactggttgtggatattgtatgccatgtccatttggggttgatattccaagtaactttaaatattggaataatcgttttgtatatgatgatgaaaaattatttaaaggaaaatatcaaaaaatggaagcgaaagcaaaagcaatcaattgtaaagaatgtggagcttgtgaaagaatgtgtccacaacaattaccaattcgtgctgatttaaaacgtgtagtaaaagatatgggagaataacgattctcctttttgaatacataaatttagtgtatgatggttataagtaagggggatttaaatgaagaagaaagttataggaattgtatctgggattgttgttgtctgtttatgtattgggggatatttttattttgattatcaacatcaacaaaaaatcatagattccatatctttagaatttaatgatatgaatcaagtggaatatggacaagcagttagtgcagagaactttataaaaagtactaatggtgaaattcaatatcaagaaacagttgatgagatgaaggtaggaaaacagacattgaaattcatagttaaaaaagagggatatacaaaagagtttacttatgaatgtatggttaaagatacaaaggcaccagtaattattttgacaaaaacaaaagatcaaatcaaatatggtggaaagtttgatataacaaaatatattaagagtataaaagatccagttgatggagatttgacatataaaaaagaaaatgaggttaaagaaggagattctaattattatacatatcataatgatatagatacaaaaaaaccaaaagattataaaattaatattattgcagtagataaaaatcaaaataaaacagaaaaaacattaactataacagtattaaaagaagataaaagtcaaccaaccacatcttcaacaacaccatatgtttcaaaacctaataataaagttatagtcattaatccaggacatcaagcaagaggaaataatgcaaaagaagcaattggaccagggtcatcaaaaaccaaagcaaaagtgacaacaggagcgacaggggtatcctctcataaaacagaatcacaaatcaatctagaaatcggtttaaaattaaaaagtgaattacaggcaagaggatatacagttgttatgacaagaacaagtcaaaatgtaaatgtgtcaaatcaacaaagagcgcaagttggtaatcagaataatgctgctgcagttattcatcttcattgtgatagttcagatgatagtcgtgtgactggtgcccatacgatagctattgcaaagaataatccttattgtccacaactttatgaagcaagctcatctttggcccaaaaagtaattcaatcttattgtcaggcaacaggaattagaaatcgtggagtttcttatcgtaatgatttaactggtttgaattggagtcaagttcctgcaatttatattgaaatgggattcttatctcatagtcgtgaagatcaatctttagcttcttcatcattccaacaaaaatgtgctcaaggaattgcaaatggaatagatcaatatttacgttaataaaaagaatgggtttatcataaattgttatatctatgatatctccattctttttattttgttagatattttgcagttatactgtgagaattttgtaaatcaaatggtgttccttcaaagataatctgtccaccattgtcaccaccttcaggacctaaatcaataacccaatcactatgtctgatcacttgctgattatgttcaacaacaatcacactatgtccttgttcaataaaatgatcaagtaattttaagaaatgttcaatatctttaggatgcaatccaattgttggttcatccattaaataaagataacgttgagaatcttgatgcataattaattctttagctaattttaatctttgacattctcctccagaaagagttgttaatgattgccctaactgtaaataaccaagtcctacatcttgtaataattgtaatctctttaagattttaggttcgtttttaaaaacatcaaaagcttcatcaatggataaatctaaaacatctttaatcgaataaccattatataatatctttaaaatcttttcttgaaattgatgtccatgacatacaggacatacgactttcgtattagcaaaaaataacatattattatcaacataaccaagtccttcacaattctcacaacgtccacctgctgtattaaaagaaaaatactttgctgataatttttcacttttagctagctttgttttcgcaaaaacatttctcatttcactatagacttcactatatgttgcaacattggatcttttcattttagtaagtggaagttgattaatttcaacaatcttatcaaattgttctaaaccagatatatttgcttttctttttgctagaacttcaaagataagtgtggatttacctgaaccagaaggcccagtgatactgacaagacaattggtaggaatatgtactgagatatttttaagattgaacatacaagcattttcaattgtaattgcttgatgactttctctaaagtgagttggaattgtttcctcttttaataaatattgtgcggtataggattgtttgttttgtaaaagttcttccattgtcccatcagcaacaatttcaccaccatattttcctgaacctggccccatatcaataatatagtctgcttctttcataacatctacatcatgctcaataaccagaacactatttcctagttcaacaagattctttaatatcttaattaatccataagtatctttaggatgtaaacctgctgttggttcatcaagaatataaataattcctgataacttagaatcaagtgttgctgctaaacgtaatctttgtaattcacctccagataatgttgtgatttgacgattaagagttaagtaacctaaacctactttgatataacgacttatttttgtttctatatctataatatagtcatttacaaaagataattgctgagtcgttatatttgtttttaaatcacttatccaattcaacagatgttctaaagaaaattcattaagttcaggtaaacgagtattcataactgtaatatgtcgacttaaatcatttaatctttcaccatgacaatcaggacattcaatgacttcaaaataatcacctaattgctttaaatcaccatttttatcagctaaacgtcgccataaaataggataaataccttcaaacttaccttgtgttgtgtttttaggtggaaggatatcaggacatttttctttgactgacttgcaatcaacaccttcaaacaagatagccttttgaatatcactcatttgttttattgggacattttgtgggatagggatatgataatgttgataagctttatagagaatagatatttgatattgattatattgtttttcaaaataacgaatagcaccatcttctaatgacaatctttcatctataacattctctttcttgattgtatgaatatgtcctaatccttggcatgtaggacaagctccttcattcgtattaaaagaaaaataactacgagttatcttatccatcttataaccacaatgaggacaatacatataaacataaaagtcttgatgaagcttttgagtttcttctttacaatcagcattacaaataagttttccacaatgtggacaatatcttaccccaagcttctcatatatcattcttaaatctgtataaatatcactcatagttcctactgtagaacgtgggtttttgttttgatctgtctgtgctataacaatagctggtgatgcattagatatactttcaacttgaggtttatgtataccttgaaaagccattgcttctaaatattgtctttgacattcattatataaaacatcaatcaataatgttgattttccagaaccagataaaccagtaaaaacaaccagttgattcttaggaatatcaattgaaatatctttcaattgaccttcattagcatgtcttatttgaatacagtccattctcattcctcccttatctattttcattatacaatatcatgtcagttagatgttttataagatgtaaaaaagataaattatttgtttaagattaaaaaaattaaaaaagaaagcggtaacttataaaaaatcattgattaattctagactttcaaaaagaaataaactaaaatagttgtgaaaaatgacagaaaaaggagaactatgtatgagtggattttttggagtggcatcaaaaaatgattgtgtaatggatttgttctttggaattgattatcattctcatttaggaacaagacgtggtggtatggcagtatatggaaagaatggatttaatcgttctattcataatattgaaaattcaccttttagaacaaagtttgataaggatgtagaagaatttgaaggaaatattggaattggatgtatttctgataatgaggcacaacctttattagtcaattctcatttaggttcttttgcaattacaactgttggaagaattaacaatttagaggaattaaaagatcaatgttttgaatatggaaatactcatttcttagaaatgagtgggggagttattaatccaactgaattagtcgcagctttaatgaatcaaaaggcttcgattgttgaagggattaaacatgttcaagatgttgttaagggatcaatgagtattcttattatgacaaaagatggaatctattgtgcaagagataaatatggaagaacaccagttatcattggtacaaaagatgatgcaacttgtgtgacttttgaaagttcagctttcttaaacttaggatatcatcatgaaagagatttaggtcctggtgaaattgtctttataactcatgattatattaaacaggaacaaaaaccttttgaaaagatgaaaatatgttcgttcttatgggtttattatggatacccaacttctacatatgaaggtgtcaatgttgaggttatgcgtaatcgttgtggagagttactagcaaaacgtgatgatgtaactccagatagcgttgccggtgttcctgattcaggaattgctcatgcagttggatatgcaaatcaatcaggtattccatttgctagaccatttataaaatataccccaacttggcctcgttcatttatgccttcaagtcaaggtcaaagaaacttaattgctaagatgaaattaattccagttcaagaattaattaaagataagagtttattattaattgatgactcaattgtaagaggaacacaattaagagaaacaacagaatttttatatgattcaggtgcaaaagaagttcatgttagaccagcatgtccaccaatcttatttggatgtaaatatcttaacttctctcgttcaagttcagaaatggatttaatcacaagaagggttattcgtgatttagaaggaacagaaaatccaagtcaagaattattgaaagaatatgcaaatccagatagtcctaaatatcaagcgatgttagaagaaatccgtagaagattaaaattcacttctttaagatatcatcgtttagatgatatgattgaatctattggtttaaaaccatgtgatttatgtacatattgttttagtggtgaagaataaaattaataatttataaaaatgagttggcatttataatgtcaactcatttcatttacttatatttttgtaattttatacaaaaagaatgaactttatagatgtctataattctaatatcttatccttataaagtatcgtgatagttgattaaatttcctaaagtatcattacaatccattgttattgtatatgtttcaatttataatgaaactataaaggaggggaaatcatggatcagatacatttaggtgataatatatcaagacttcgccatcaaaagaaaatcacacaagaagaattagctcgctttatgggcgttacaaaagcttcagtatcaaaatgggaaaccaatcaaagtttaccagatattcttttgttaccacagcttgcttcgttcttcgatatctcggttgatgaattattgggatataaacctcaattaagtaaagaacaaattcaaaaatattattttgattttgctgcacaatttgctagtgaggcatttgaagaagtgatggaaaaaagtgaagttctggtgaaaaagtattattcttgttatggattcttgttacagatatgtgtattgtggttaaatcattgtcatatggcatcaactcaagaaagacagatagagattttaaaaagaattgctgaaatttgtagtcatattacatctcattgcttggataatggaatttgtaatgatgccattatgttgaaagctatgtgtcaattacaatatggggaaattgatgatgtgattatggttttagaagaaatgttgaatccatatcatttctttcatcaaggagaatcgatattgatacaggcttatcaaatgaaaggccaatttcaacaagcacatcaatttactcaatttgaaatctatacgcatttaatggaatttattaatctttcaatccattatttaagtattcatgttcaagatttacaaagatgtgaagaaacgataaaaagactagatgaagtcataaagacttatcatattgaaaagcttaatcctaatacaacggctcaattttattaccaatgtgcgattgtttattgccaacatcaaaatcatcaagaagcactgaaaagattaactgactttgtgagattggtttgtgaaatgatggaaggagatcatattttacttcatggagatgaatactttgatcaaattcatatttattttgaacaatctgatttaggagttcatccagtaagaaataaaaaactcattttacaaagtgctttacaagctttagaggtagcagagctgaatgtattaaaagaagatcattgtttacaaagtttaaaattacaattgaaaagaaaaggagaaacattatgacactaaaagatattttaccatttttaattccacttattattgttgaatttgccttactggcttatacattacatcacatattaacccatcaacattataaaagaggtaatcgtgttttatggattattgtgacacttgtaggaatggagtttattggaccggttttatattttgttttagggaaggaagataattgatggatatgttaagggtctcacatgtttctaagtcatttggctctcatgtggttttagatgacttgaatttcgcagttaaggaacatacaatatatggttttattggacaaaatggagcagggaaaacaacaaccatgaagatgattttgggtttacttaaaattgatcaaggtgaaattgaagtcaatggacaaaaagtcacttatggtcaaaataaaactaatcagtttattggttatttaccagatgttcctgaattttatggatatatgacaccaatggaatatctaaaattatgtggagaaatatcaggtatgtcatcattagatatccaaaagaaagctagtgaattattagaacttgttggtttaaaagagactcatactcgtattcaaggtttttcaagaggaatgaagcaacgattgggaattgctcaagcacttttaaatagtccacgtctattaatatgtgacgaaccaacatcagctcttgatccagtgggaagaaaagaaatattagatatattattatctatcaagaatcagacaacagttattttctcaacacatattctttctgatgttgaacgtatttgtgatgaaattgctttattgcatcatggaaaaattgctatggaggggaaattagaggacttaaagaaacttcaaagaagtaatggttttgagatagaatgctataacttgcaagatgctgattatttagcaaatcaaatagctggaagtcaaagactaaattctacaaaattgtattatcctcaaaagacaaaagaagaaatgactcaaacaatgttattcattgcaaatcatcaactgactatacaaaaaatagaaatgtgtgaaccaacattggaaaatgtctttatggaggttattgaaaaatgaaatcattatatgcatttataaaaaaagaaagtttagaattaattcgtagtggcaagcttgttttattagttatcatatcttgtttatttggtattatgaatccatttattgctaagataacaccttggctgatggaaatgatgtctgatcagttagctgaatcaggtatgagcataacaaccattaaggtagatgcaataacctcttggacacagttttataaaaatgtaccactattattaattatctttgtaattattatgagtggaatattgacaaatgaatatcaaaaaggaactttaattaatattcttacaaaaggtttagaaagatggaaagtgattattgctaaggcaatgattatgattggattatggactatttgttattggttatgttttgtagtaacatatctttataatttatatttttgggataatcaaatcgtttcacatatggttttaggtgcaagttatgtttatctatttggaatatggctgattgcattgattttacttggttcaactttgtttcgtacaagttatggcgttattggatttgttggtggagtttttatgattgtttatatattaagcatggttccacaaattcaagaatatttaccaagtcaacttttaaactcaatgagtttattgttatcaacaacgtatcctagtgattatctagctactatacttattgtattattgacttctattatgagtattggtttatcactagttatatttaataaaaaggcattttaaaaacgagagaaatctcgtttttataaatagcgatccattcttgctacacatatacctataatagataaacttaatgtaagaatatgatcggtatggaatatgagagatgaaataatacaaaataaagtcattattatacaactgtaaaataatacattttcaaattgtaattcttttagtcttttcaagtttcattcctcctttgttaagaataatatagcaaataaaaatgaatatattgtggaaaaatcatgaaatttttgtgaatgtaaaacaaaagaattgctttcaaataatagttcatgtaaaatgaaacacaaaaaggaggatacttatggatagaacaaaacaaattgaacaaagtatcataaagaaatatcgaaaaccaatatggcggaaatttgttaaaggtgtacaagcttatgatatgattcaacctggtgataaaattgctgtatgtatttctgggggaaaagattcaatgttgatggctaaacttttacaagaattaaaacgtcatggtaagtttgattttggtttggtttttctatctatggatcccggatataatgaaaagaatcgtcgtaagattgaagaaaatgcgaaaatattagatatacctgtggaattttttgaatcagatatttttcaagttgtaacaaatattgaaaaatcaccatgttatttatgtgcaagaatgcgtcggggatttttgtatgcaaaagcaaaagaattaggatgtaataaaattgcattaggacatcattttgatgatgtgattgaaactattttaatgggaatgttttatggttcacaagttcaaacgatgatgcctaaacttcatagtacaaattttgaaggtatggaattaattagacctatgtatcttattgaagaaaaagatattatacattggtgtgaatataatgatttacattttattcaatgtgcttgtcgttttactgaggaaatggaagaattaggtgaagttcatcatacgtctaaaagagaagaaatgaagaatttattgaaatatttagaaacaatgaatccaaatgtgaaaaagaatgtttttaagagtgtagaaaatgtcaatttggcaaccataattgcctatagtgatgatgaagggaaacatcatttcttagatacttatgataaaggagaatgatatgttttcaagatttgaattattaattggtgaagaaaaacttcaacagttacaaaactcacatgttttggtttttggtgttggtggggttggtggttatgttgttgaagcgttagtaagaagtgggataggacacataacgattgtggataatgacgaagtctcactgacaaatcttaatcgtcaaattatagcaacaagagaaacaattggtaaaaagaaagtagaagttatgaaagaacgtattctttcgattaatcctgattgtcttgtgacagaattagaaatgttctatttgccagaaaatgctgatactatcgatttgacaaaatatgattatgttgttgatgcaattgatactattacttcaaaaatcgaattggctatgcgttgtgaaaaattaaatattcctttaataagttcaatgggcacaggaaacaagctcaatcctgcaatgttagaagtcagtgatatttataaaacttcagtttgtccactcgcaaaagtcatgcgtaaagaattaaaaacaagaggtgttaaacatttaaaagttgtttattctaaagaattaccaatcaaaccaagacaatctaatgaattaacaaataaaagaacagtccctggaagtagtgcttttgttccatctagtgcagggcttcttattgcaagtgaagttatcaaagatttgctgaaataagcaaatcttttgcactttttagacatctttttcataaattaatatgaggtgtttaagtgatgaaagagatattacaagcttatatttacaatgaaaaaatgttaaatgatctttataaaagagcggcagccttaacctgtagagaagatgaaaggcaagcccttttaaattttgctgatcattgtcatcaaataaccaatgaattaaatcaaatctattatgaacaattcgatgactattatcagccactcattcatgaacaaaatatgcaaggaagtttccgtgatgttttgaatcgtattcaaacattagaaatcggatattatgatacctatcgtcgacatacttatagcaatgatcctattttaaaagaagcaatgcgtgaatttgctgatttaaaattagcccatacattagcaattatggcaatggttattgatatgaatgattaatagacacaatttttaaaacaaaacatacattatatagaggtgtatgaaatgaatagggatcaactccaatcttatatttatactgaaaaattattagctcaactttatcgaagggctgctgcactagcaacaatgcaaagtgaaagagatgctttattagcgtttgctagagatgctgaacagaatgcgaattacttgaattatttttatcgattagaatttggaactgcctttgatccaatgataccagacgttaatattcagggtggttatcgagaattattgaatgaaattcaaagacaggaattatcatcatttttagcattaagacgactcacatataatcaaggaaatgctgaattaagagaaacaatgagagctattacggacaacaaactggaacatattttaacaattttagcaattgttacaaatatgaatactcctgggcaagaacgtaaaatttaatcataacaaagcgcataaaagtgcgctttttttttggcttttgatagagagtagacaaaatctacgcatagttagtttttttatgagctaaaaaatgatatacttaggtcaaggaggagtcaatatgtacgatgtttatacaaaacgaaacgataagaaaaaatatattatagcaggtgttgctattgtgggtgtgattgcaattgttgtagcgttctttttgttaaaaggagacagcaaagaatcaacattaaaggactattatgcagctattaaagaaaagaaatatgatgaaatgtataatatgattagtgaacaatcacaaaaagcgtattcaaaggatgaatttataaaaagaaatcaaaatatttatgaaggaatagaagcaagtgatattgaattgacaattgattcaagtgaagatgatacaattcaatataaagtaaaaatgaaaacattagcaggtgaaatcagctttgataatcaaacaaaaatcaaagatggtaaaattgtttgggatgattcttttgtgtttccttcattagaaaagacagataaagtgcgtataagtgaagatgatgcgagtcgaggaagaattttagatcgcaatggaaaagttattgctcatatgggtgaagcttattctgtaggattggtgagaggaaagttaaatggtgaaagtgattatgagaaattagcttcattattagatctaacaaaagaaggtattcaaaaaacaatgagtgcttcatggattaaagatgattcatttgtacctttaaaaacaatttcaaaaagtgatacaaatttagaaaatagtttattaaaaatacctggggttaaactcactacaacaacagttcgaagctatccttacggagaagcaacatctcatcttgtaggttatatgcaaaaagtaacagctgaagatttagaaaaacataaaggtgagggttatgatgaaaactcttatattggaagaagtggaattgaagctgcttatgaaaaagaattaaaaggtcaagatggtgtatctatttatattgtagatagtcaaggaaataaaaagactgctctagcaagtcatgataagaaagatggtcaagatataacattgacaattgatattcaattacaaaataatttatatcaatcctttaaaaaagataaaagtgcatcagttgctatgaatccaacaaatggagaaattctagcattagtgagtacaccaacttttaatagtaatgattttattttaggattaagttctacaaaatgggatagtttgaataatgatacaaataaaccattgcttaatcgttttaaagaagcatgggttccaggttcaacaatgaaacctttaactgcagcaattggtttaaatactcaatcattaaatgcttctgaagattttaatgctcaaatgaaatggcaaaaagattctagttggggaagttattttgtaacaactttacatgctcctaaaccaaataatttaaagaatgctttgatttattctgataatgtttattttgctaaagcagcattaaagattggtaaagataatcttgtaaagggttataaagcgatgaaaattggtgatgaaattccatttgaattatcattgaagaaatctcaatatacaagcaaggattttagtgaagatattcaaattgcagatagtggatatggtcaaggacagattttgatgaatccagtacaaatagcttctatatatggagcgtttgtaaatgatggaaaaatgatggcaccacatattgttaaatcaacagaaacaaaagtttggtctgaagctttctctaaagccgttgctgatgaaattaaaaatgatttggtaggagttatcagtgatagtcaaggaacagcacactcattttatcataatggcatgactttagcaggaaagacaggaacaggtgaaattaaagcttctcaagatgatacgacaggtcaagaagttggttggtttacagtaatgacaactgatgcaaagaatccaattgttatatcttctatggtggaagatgtcaaaggtcgtggtggaagtaattatgttgttaatcgtatgaaacaaccatttgatagttatgtaaaataatagaaaaacagagattgcttttattcaatctctgttttcttatctttatataaaataaaaaaacgatcagatgatcgttaatttttaaatggtgacctgtacgggattcgaacccgtgaatgcatgcgtgaaaggcatgtgagttaaccgtttctccaacaggccacaaaaatggcgcttgaagtaggactcgaacctacgaccgatcggttaacagccgattgctctaccaactgagctattcaagcgtttaaattggagcggatgatgggaatcgaacccacgtagtcagcttggaaggctgaagttctaccattgaactacatccgcattagaatggtgcccagggccggagtcgaaccggcacggattttaaggtccgcaggattttaagtcctgtgcgtctaccaatttcgccacctgggcaattcaatttttaatggtgacccgcaggcgactcgaacgcctgaccctctgattaaaagtcagatgctctaccgactgagctagcgggtcttggaaatggtggggaggggcggattcgaaccaccgaaccgaaaggaactgagttacagtcagccgcgtttagccacttcgctacctccccatcaatatggtgccggctaaaggacttgaaccctcaacctactgattacaagtcagttgctctaccagttgagctaagccggcaatggtggaggttaacgggctcgaaccgctgaccctctgcttgtaaggcagatgctctcccaactgagctaaacctccataattggctgggatacctggattcgaaccagggaaatgacagagtcaaagtctgttgccttaccgcttggctatatcccaagaatgttgctcatataatataacaagtttttatcttttagtcaataactttttgaaaaaaattgtaaaatttttttcaaaagaaaacaagtttccatatgagataaatccagtccctttaaacaatgtttattataacactgatagtcaccgcatgcaattaaaaaatacaacagaataatcactttaccaagaaaaaaagtacattttttcaaatgtacttaagctttttgttccattaatttttcaagtgataccaatttgacacaaatagtaaagatttctgtagctaattgtaaatcatctaatggtaaataagatggtgcaagtctaatattactatcatgaggatctttaccataaggataagttgctccagcacttgttagtgttacaccagcttcttgacatcttttgacaatttctttagcacaaccttccattgcattgaaagaaacaaaatatccacctaatggttttgtccatgttgctatatttaaacgacttaattcatgtgataatacaatggaaacagtatcaaatttaggtcttaataatcttgcttgtttttccatatgtttatttaaactattaggtcttttaaagaattcaatatgtcttaattgattaatcttatcatgtccaatacattgaatagacatatgttttaaaatatcagctttgttttctaaagatgttgccattgctgcaactccagccccaggtagtgtaacttttgatgttgaacaaaattcaaatacaagatttggatttccagcatctttacaagcctttaaaatatccataacatgggctctaggacttgtatgtaaatgatgaagaacataagcattatcccaaaatattctaaaatctttagcagctggttttaaatgtgcaaatctttgcacaacttcatcagaatatgttacacctgttggattagaatattgtggtacacaccatatacccttaacactttcatcattattaacatattcttcaactaaatccatatctggaccattttcatccattggaatattgatcatctcaaaaccaaaatgttccgtaattgcaaaatgacgatcatatcctggtacagggcataaaaacttaattttatctaactgacaccaaggtttatttcctaaataaccatgggtataaccacgactaatctgatcaaacataatagttaaactactatttccataaacaatgacttgatcaggtgttgtttctaatatattagcaaaaaattgttttgcttcatcaatcccatctaagataccataattacaataattaattctatccccaaaaggataatgactatcaacagtatctaaaacccctaaagacaaatgaatttgttcaaaatctggtttccctcttgccatatttaaatttacgttcaatgctttcattctttcatattccttagatacttgagcatgcactgacattaattcttcatgatttaattttgtatatttcttcatgatttgtccctctctatttatattaattgaggtaattgtactctttcaaagggtaaaatgcaatgtcaaaaatagagataatcaaaaaatatacataaatagtaataattactatttaaattaagaaaaaggtggtataataaacacaagaggaggtattttatggatacaacagcattttttaaacttacttatggcttatatattgttacaagcaaagatggagaacatgaaagtggttgtgttatgaacaccatgacacaagtgactgcagaaccagcacaggtttgtattacccttaataaagataattatacaactcaattaattgaaaaaagcggtgttttcaacgtaagtgtcttattggatgatgtttcagtggacttaattcgtcaatttggttttcaaagtggtagagatgttaataaatttgaaaacattaagtatgatactgaccaacatggtgttaaatatttgactcaagatagtgcagctatgtttgtatgtcgagttaaacaaaaagttgatgtaggaacacattatatgtttatttcagaagtatgtgatgcgaaaactttaagcaatgaacctgttttaacatatacagcttatcatgaaaagaaaaaaggtacgactccaccaggtgctccatcttatatcgaagaaacaaagaaacaaggttggcgttgcgatgtttgtggttatatctatgaaggtgatagtctaccagaagattatatttgcccaatttgtaaagttgatgcgagtcattttcataaaatatagagtctttgagaggactctatattttaacatagggaagtaagcgtttacatagaattgctagaaatggagatgaagtataatggcaaagtatgtatgtacagtttgtggttttatttatgatgaagatgtaggaataccagcatctgatattgcagctcatacaaaatgggaagatttagatgaaaattgggtatgtccgatttgtaaagctccaaaaagtgcttttaaagaattgatagaaacagtaaaaaaagaaataaaacgagaaaaagttgaacaaaaatggtcgaatctagaaatgagtatcttattatctaatctagcaaaaggctgtgaaaaacaatacctttcacacgaacaagaactttttaatcaacttgctgattattatgaagcaatagatgaatatctaccaatcgcttcattagaaaacattcaagatgatttaacaaaagatatcaatgaaaattatcctttagctcaccaaagtgctgataatcaaaaagatcgtggagcaaaacgagccattgtttggagtgaaaaatcaacaaatatgttaaattctttaattgaaagatatcaaaaagaaagagaagcaatgttacaagatacaaaagtatttgtatgtgaaatctgtggctttgtttatattggtgatcaaccaccagctatatgtcccgtttgtaaagttccaagtttaaagattcatgaagtgaaaagagggattgctgtatgagtgaattaagagcgttacgtaatattagattatgtacaaaagattgtttatgtttatatgtttgtccaactggtgcgagtgatactgaaaatggacaaatagatgcaagcaaatgcacggggtgtggaatgtgtgtacaagcttgtccatctcatgctttatcacttgttccctatgtttatccacctcaacaagtaaaagaaaaagaagtccttgatgatttacatcgtttaatttcaagtaaagcaaaacaagtttcttctttacattatttaaagacacataccaatcagccaattgttgctcaattagctcaagcaatggaaacatctaatcgtgttatgggtgaagatttagccagagaagctggttatatgttaccacaaagtcaaaatactcatgatttactcacattaattgttgaaaatgctgaagatgaaaatataaaaaagatagctcaagaactcttagaatcacttcctatcaatgatcaaaaacaagcttgttcaaaatatgctggaacaaaaactgaaaagaatttaatggaagcatttgctggagaatctcaagcaagaaataaatatacatattttgcacaaatggcaagaaaagaaggattggaacaaattgctgcaatttttgaagaaactgccaatcaggaaaaactacatgcaaaaatgtggtttagtgaatttcatggcattggttcaaccgatgaaaacttagaagtagcagctgctggtgaacatgaagaatggacggatatgtatgcaagaatggctaaagaagcaagggcagagggttttgatgaattagctattcaatttgaaaatgttgcaaaagtggaaaaatcacatgaagctcgttatttaagattattaaagaattataaagaaggtcaaactttcaaagcagatactcctataagatggaaatgtcgacaatgtggatttatctatgaaggagaagaagcaccaaaaagatgtccaacttgtggatatcctcaagcttattttgaaagaatgagtgaaaattattaaaagaagctgaattcagcttcttttaatctggaacttgtaatctatttaaaacaacaacaaaggttgttttttctttatgactagtggcaaagatttgtccattatgaatatgaataatatttttagcaattgcaagtcctaaacccgtaccaccagtagaagatgaacgagacgaatcagaacgatagaacttatcaaaaatataaggtaaatcttcttgagaaataggatttccataattcataatcttaatggttacagtttcatcatcattaagaacttcaattttaatctcatgattatcttgaccgtatttcacagcatttgacaacaaattatcaaaaactcttgcgattaattgaccatcacctttaataaaaagattaggttgactaattctaataaccggagttaaaagatgttcttgaaaagttggataaaactcatcaaccatctgtaaaaccaattcagaaatattgattgttgtcatatgaactttaacattggcttgatctaaacttgtaaattcaaacaaatcatccatcattccttgtaatctctttgacttttcataagccacagtagaatatttttgaatatcttctttggataaatgttcattatttttaatcaattccaaatatcccacaatagtcgtaagcggtgttcttaaatcatgagcaacatttgtaatcaagtcatttttttgtttttcagcatttctttctgcatcaaaagctaatctttcattttcctttaaaatttcactttctctttccttatcttttaaagtctttgctaaagcattaatattagctgctaataaaccaagctcatcatcatattcaatcggtgcttccacatcataatacccagccgttacttcttgtattgttccacttaagacactaatatattttaaagtaatattcattaaatcaaaaaagatcactaagaaaataactaaagaaatgacaaaagctaagaagtatttcacttcaattgacattccaaaaatattaaaactctctaaaataatcacaattgcactataaactaaaaacgttaaaatataagtcacaactaaattaatgaacagtctccaacgaaaactgctcataaataatcttcttattttattcatcataagtcaaatttataaccaatcccccaaactgtcttaatatgtcgaggatttcttggttgcctttctaccttttcacgaagttttctaatatgaaccataattgtattattagaatttgttgacttctcatgccatattttttcaaaaatatcttcaattgaaaaaactgtacccggggcacttgctagtaaaacaagaatctcatattcaattcttgttagtgataaagcaacaccatctaaagtaacagacttcttttgtgtatcaatgagtaaatcattcgcttcaataatatgtgttgaatcattgattggtttattaaaaacctgagcacgacgtatttgtgatttaacacgggcaactaattccatcgcattaaaaggtttacttacataatcatcagctccggttaaaaggccttcaatcttatcagtatctgcagtctttgctgaaacaatgattacaggaatattatatttttctctaatcatttttaaagcttgaataccatcaatctcaggcatcatcacatccaatatgacaagatcaatatgaaaagcttcaatatcatctaataaagtcaaagcattatatcttttttcaacttgatatccttcttgagttaaataaatttctattaaatcagtaatttctttttcatcatctacaactaaaatatgaggtacatccattctatcatcctccttcatattcattataaagaaaaatagaaaaacgacaacctatttcttttcttgaaggttatttttataaggttgtatagaataaatgagagagttcatacttaaaaaaggaagatgttattgatatgatagaaaataattgatttgataataattttttgttagaataataaagggcactcagaatcttccattgagtgcattttttattgagttgaaaggagataaagtatgacaaaatttatatttgtaacaggtggtgtagtatctggtttaggcaaaggattgacagctgcatctttaggtagaatacttaaacaacgtggcttaaaagtttttatgcaaaagctagatccctatataaatgttgacccaggaaccatgtccccatttcaacatggtgaagtttttgttactgcagacggagcagaaacagaccttgacttgggtcattatgaaagatttattgatgaagaattaaatcgtgattgttccattacaacaggaaaaatctatagccatgtcattgctaaggaaagacgtggtgattatttaggagcgacagtccaagttgttccacatattacaaacgaaattaaagaaagaatctatgcagccgctaaaagcagtcaagctgatatcgtaattagtgagattggtggaacggttggagatattgaaagtttaccatttattgaagcggttcgtcagattcgtttagatttaggttatgaaaatacactttatatacatacaaccttgcttccttatattggagctagtcatgaagtgaaaacaaaacctactcaacatagtgtaaaagaattaagaggctatggaatacaacctgatattattgtttgtcgtagtgagaagtatattgatcaagaattaaaagataagatttctttattttgtaatgtccctacaaaagcagttatttctaactatgatgtagatgttttatatgaattaccaatgttattgttaaatcaacatatggatgatttggttttagaacatttaagaatagatgcgcctaaagcggatatgaaagcttggcaagagttgattcaaagagtcaaagggttaaataaagatattacaattaaaatggttggaaaatatgttcaattacccgatgcctatttatcagttaatgaagctttaaaacatgcaggatactatgaaaatagtattgtgaatatcgaatgggtgaatgctgaagaaataactcaagaaaatgttagccaaatgttacagggggcagatggtattttggttcctggtggatttggtgaacgtggaattgaaggtatgattacagctattcaatatgcaagagaaaacaaagttccgtttttaggaatatgtttaggtatgcaattagcttctattgaatatgcaagacatgtttgtggattgaaagatgccaattcgattgagtttgatgaaaattgtttaactccgatcattcatttaatgaatgatcaatcattagatgatatgggtggaactcaaagactaggaaattatgattgtcaattgattccaaaaacgaaagcctatgcattatatggtaaatcacttattcaacaaagacatcgtcatcgttatgaatttaataacgaatatcgttcaattttagaacaacatggtttaacaatttcgggaatcaatccagaaagaaatttagttgaaattattgaaatagaagatcatccttattttgtagctgctcaatttcatcctgaatttgcttcaagaccaaatcatagtgaaccattatttcaaggatttatcactgcagcaagtcaaaatggcaagtaattgccattttctttttgtctaaaaaagggtaaaatagaacaaaggagatttattatgaataaacataacatggaaaatattaaagattcgtattttgtttttaaaactttagcacaaacaaatattcaagaattatttcaatatcattctcgaaaatattatacatttgatatcacaaaattacagaaaaatgaaaataatacatatttatcaattgatttaaaagattggacaagttttgaagatgttttaaaagttctttatcaattaacaaatccttcatcagggagaccaggtttctcaataacaacaatgattaagggatatgatttatcccaacaacaacattttgtttttacgggacagtttataaatggaaaacataccgtgttagggtattatgaagatggagtagagatgtattatgataaaaggaatgaagttctctatttaagtggagatgtcaaaccagaagcttatcaaaagattgggagaatgtgaaataacttgaattgaaaggaagatagatttatggaaataaaagaagtgacacaaagaacagaaattatagaaccattattagaggtttggcaaaaatcagttagaagtacacatcattttttaagtgaggaagaaattgttgcaatttctcaatatgtaccaagtgcttttgaaaacgtccctcatttcattgtgagctatgaagaacaaaagccagttgcttttatgggaattgatggagaaagaatagaaatgttatttattgatcctatttgtcagggtcggggaattggaaaaaaattaattcaaatagcaattcaagattatggagcaaatgaggtttgtgttaatgaacaaaatcctcaagctaaaggtttttatgagcatttaggatttcatgtttacaaaagaagtgaatatgatgaacaagggaatccttatcctttgttgtatatgaaattggatattaatggtaacgatttgcttaaccaatattgatagtttacgcatttaaagatataatggtcaatgaactttgacgaaaggattgatgatatgggacagacaagaaaagacttagctaaggaatttaatgaatgtcgtccaatcctttcagtattaggggacacaacacggcaaagcattattttatgtttattagaaaatattcaatgtggaggtatgcgagtaggagaattatcttcagtgattcatatttctagaacagctttatcacatcatttaaaaatattaaaagaaagtggtattgttgcgatgagagaagaaggtacaaagaatttttactacttgaattaccggagtcgacgtatggcttctttagtcaaattatttcgtaagattgaagaagttcaagatgataaatgtgaaacatgtcaaaatcgtatatgtgaaggagggaaataaatgaattataatatttattttagtcctacaggtgggactaaaaaggtaacaagtttggtttcagaacaattttctccagttaaagatattgatttatctttaattgaagattttagtcaatatgaatttaatcaagatgatttttgtattgttggggtaccttcatttggaggacgtgttcctgcaattgcgattgaaagattagctatgatgaaggctcatcaaacacctgtttgcatgattgtgacttatggaaatcgtgcttatgaagatactttattagaattgaaagatactttaaaacaacaaggttttcttccttttagtgcaatggcctgtgtttgtgaacattctattatgcatcaatttggacaagggagacccaatcaacaagatcaacaacaaattattcactttactaaaaatataaaagaaagattaaccaaagaactcactgaaatagaagttccaggtcaaagaccttataaagaatatcatgggattccattaaaaccaacagcttcaaaaaaatgtattgaatgtgggatttgtgcaaaatcatgtccagttcaagcaatagatatcaaacatcctcaacaaacagataaagataaatgtatatcatgtatgtgttgtattgcagtatgtccaacacacgcaagaaaaaataatcctgttttattggcagcttcagttcaaaaattaaagaaagcatgtcaacaagcaaaggaaaatgaacttttttaggaggtaatgaaaatgttaaaagctatatttattgatcatatgggaactttggtatatgaacaaagtgaatatttagaagcattattaaaaaaatgtgttgaacattcagatgaaaaggatcctcaaaagattgctgatttatggcaaaagaagcatgatgcattattaaagaaatataatggtgaaaactttaaaaaagaatatgatattgttttagaagcttttgatgatttaaaggcagaaattaatcttgaaggagatagtcatgaatactgtgatttattagttcaacattggcttcatacacctgcttatgatgatgcttatgatttctttgaacaatgtccattaccaatttatattattacaaataatgatacttgttatgttgaagaaagtatgaaattgttagaattaaaaccaaagggtattatttctagtgaaacaacacattattacaaaccagctaaagaaatgtttgaaaaagcattagcaatcacaaagcttaatgctgatgaagctatttatattggtgatagtttaaataaagatatggaagcagcaaaggctgtaggaataagagctttcttaattggaaaagaaaaaacagatgatcctgatattcaatcacttgaatcattattagatgtttttcaatatttataatcaagtcatttgacttgatttttttcaatttctgcaaagtttaattcattcgtttaaaaatcatgtatgatgaataatggaggtataattatggcaataaaagtaattattatggatgtggatggaacccttaccaattcaaaaaaagtggtgacaccaaaaacaaaagaagctttattaaaagcagaagaaaaaggagcaattttaatattagcatcaggaagaccaacatctggtttaatggatttagcaagagaattaaaaatggatcaatatcatggtttattagtagcttataatggttcaaaggttattgattgtaaaacaaatgaaacattatttaatcaagctttaagtgttgaagaaggaaaagctgtcttagaacatatgaagaagtttgagcgtgtaagaccaatgattgataaaggtgagtacatgtatgttaataatgtttatgataattggattacatggaaaggggaaccttttgatgtcattcaatatgaatcacgtggtggtaagtttaaattatgtgaagtagatgatttagcagcatttgttgatttccctttaaataaaattttaacaacaagtgatcctgaatatttacaagctcattatcaagaaatgatggaaccttttaaagatacattaagctgtatgtttacaggagatttctattttgaatttactgcacaaggcattgataaagctaaagccttagatactgtcttatcacctatgggatatcgtagggaagaaatgattgcttttggagatggacacaatgatgcttcaatggtaaattatgcaggaattggtgtagctatggcgaatgctgtggatgatttaaaggctattgctgatgaagtgactttatctcatgatgaagatggaatagctgcatcattatataaacatatgcctgaaatagtctaaacaaataaattaaaaaagtgataaaatggatagtggaggtgtttattatgaaattaggaattgttggtagtggtatgattgttggtgatttattatcgtttattgaacaaatcccagaaattgaattggtgcatatttcgggaacaaaacgtagtgaagaaaaattaagaacaatttatcaagaacatcattttcaaagatattctacatcatatgatgaattacttaatgatgaacaagtagatacaatctatattgctttaccaaatcacttgcattacacatatgccttgcaagcactagaagcacaaaaaaatgtcatcttagaaaaaccaatgacatcaaatattgaagaagccaaagagttacaacgtgtcgcaacttcaaatcgtttattcttatgggaagccataactaatcaatatttaccaaattattataaaatcaaatcattattaaaagatttaggtaaaattaaggtagtagaatgtaattattcacaatactcatcacgttataatgcttttaaagaaggaaatatcttacctgcttttgattatacaaaatcaggtggagcattaatggatttaaatatttataatattcattttgttgtgggattatttggcaaaccaaaagatgttcactattatccaaatatagaaaatcatatcgatacatcaggtatccttattcttgaatatgaaacattccaatgtgtatgtattggagcaaaagattgtaaagctccactttctaataatattcaaggtgatcaaggatgtttacatgttccaacaccattaagttatattggttcaatggaattattattaaatgatggaacaaaagaaacaatcaatgataataaagatgtccatagaatgtatgaagaatttatggcatttgttaagatgtatcaaaataatgattatcaacaatgttatgaaatgttagaacatagtatgattgtaactgaagttcaaacaattgcaagaagaaaagcaggggttatcttcccagctgatgaaaagcacatttagtgctttttttcacttttttcttgactgtagagtgactctatagtgtttaatggagttagaaagaaggaatgagcatgaaaacaagtgatttagaaaaattgttaggattatcaaaacataccattcgttactatgaaaaagaaggcttcattcaacctcatagagatgaaaacggatatcgtgattatcgtgatgaagatgtacaaacactcaaattagttaaatttttaagaagtttagaaatatcgattgatgatgttaaagctattttaagcggagatttaaattttcaagaatgtttaaaaatgaatcaagattacctcagtcaacaattagaaagtattaaagaagtcaaacaaacgatagattattatcaagaaaaaaatgttcctttaattcctgctcttaatgaatttcaaatacagtcaaccaaatctaaacttggttttcaaaaaacaacatcaaatgtttctctaggtagaaaattaacacgctcttgggcattgagacagattatttatgctatgatagcgtccttagctttaggttgggtattagcaacttttttcttcgatgatctctttgctaaaataatatgtataatcattattgcaatgatatttgaaatattatttatagccagtgcatttagacaaacaacctctttgatgctggataattctatgaatcaatcagtcgaatttttaaatgatgggattcgctattatcaatttactggttttgttcataacctaaagtattttattgctgtattgttgaataaagatgaagaatatatgtcttattatcgttatgaagatattgtaagtgttgagattcgaacagtaaaaagatatatgaaaataggttcaccactagcttatgaagtgtttgtgccagatttccacttctattttaaagacggtaaagatttctatttcttttggccgatgattttaggcgatgatataagaatgattgcttgtattttagaagataaaataaaaaacatagacgataaaaagaatatcctctatgcaatgaaaaatggtattaatttaaatgattatttgattggtgaataattttcaaagaacgctctacttcttttattaaagtagggtgtttttttgtctgtaagagttctaataaaagaggttgactttgtggaaaagcacttaaacaagttatcagtttaaacatcattaaatcatcttgtgaatatttttcaatttgttgacagacaaaagaataggtttcttcatttgcgagttcttggtgatagaagcaaagaaaacctaaggcatcaatggcttctagtaactgttttcttgaaagtgagcttaaacaatcgaaaaataaattaaacttttcaatagaaatataggctaaacttctcgcaataatatctctaggtaaagggtaactcttttttagtgaacctttaactggcaattgtcgatattggttatgaccaatttttcctaaatactgacacatcatgggaatatcaccatattgagttaattgattttgaatctctatttttgtatagagagctttttctttatgtaattgttgaagtaaaatagaggtgtaatcttcatcttgatgatagttttgggataatatacgaatacaagctgttcttatagatgcaaagtcatgtaagtgagaaattaatactgctttggataaatcaagaaattgattatattcttgttcatcaaattgacctctttgttttaattgttgtaaattacttttcattgtcatcaccttttttatcataacatattttcacaatgaagatagaaaatttatcatattttaaggaatataatgaaaatggtgatgttatggaattaatggaaatatttgataatatgaaggaaacaaggaagctaatgcatccttaccgtagtgcaattgaagttgtaacaacaaaattacataatattgatgatgaattaaaatgtgaaaatggttatagccccattcacaatattcaatcaagaatcaaaacgccacaaagcattatagataaactcaaaagaaaaaagctacctatcaccttagaaggtttaaaccaacttaatgatattgcaggtttaagggttgtatgtcactatatcaatgatattcaatacatatcacaattatttattatgaatgaagatattcaactcattaaaaaagaaaactatattgattatcctaaagaaagtggttatcgttctttacatttggtagtgaaagttccaatctatttaaaaacaggagtaacttatgtccctgtagaaattcagttaagaacgatttcaatggattcatgggcaagcctagaacatgttttatcttataaaagtgagcaacctattgatatagaaatacgcgaaaggctcaaaaaatgtgctcgaaagatggctgaggttgatttagaaatgcaaaaaatatctcaggaactaaaaaaataattcacaatctttccataatattatgtataataaacaatggaggtatttttatgagattatcatctattataaatttagggaaagaatgtttgatacttgctggattatttattttagggatatgtgtattttatggattctattgttttattcaaaaatatgtttttaaaaaatcaattcaaataaaaaagaagaaatttatcataaatattcttttaatcggatatatcattgttgttttgttagtcacattagcaggtcgcgcacgtgtaatacaatatgggataagtttagaattatttagttcatatcactatgcttggaataatttttcaatagttgaatggcgtaatatcattttaaatatcctcatgtttgtgcctttaggttttttattacctttggttcatgaaagttttaagacatggtggaaaacttatttagcaggattaggtttgacggtttttattgagttaagtcaattgatttttcatctaggggtttttgaagttgatgatataatgaataatgctgttgggtgcatgattggttttgggatttatgcactatttgctttgatatatggttgttttcaaaagaaagaagtaaagattttaccaactttgttaaaacaaattcctactttattaaccgtttgtctttttaccggaatttttatgacttataaatatcaagaatatgggaatcttagagattatccgagttctcatataaatatgaatgatattcatgttgaaacgcaaatatctttatcagataaaaaagaaaaagcttatacttatcaaagtcaaagctatacacaagaacaatgtttagaaaaggctaaaagcttttttcaaatgattggagtgacaatagatgaatctttaaatgagtattatgatgaaacagtctatttttattcagttaacaaaacccattgtatatcaattgattatatagatggatttataaattataatgatttttcattgtttgatcaaaaagataaaggtttatccttaaaagatattcaaaaaatattaaaaaaatatgatgtaatgattccagatcaggtcagttttagtgaaacagaaggaacatatgaaatcattgcttatatgacaaaggttaatgatgtatatttgaatggaactttaacttgtgtagtaaataacggaaagttggctgatcttcaaaatggactcataacatatatgccttataagcaagtggatattctttcagaaaaagaagcttatcaaaaaatattagatggttcatttattagtgattatatggaatacttacctcaagatttaattatatctaaagtacgattaacttatcgaaaagatacaaaaggctttatgcagccagtctatgtttttaactgtataacgaaagaaaatgaaaatttaggaccaatttatattccagccatcagaggatagattttttctatgaatagtgtaagttgcttttgtatattcataaaaattgtgctagaatagggcaggaagggtgataaacatgatgagaattgggcaatctatagatattcatcaattagtagaaaatcgtaagttaattttaggtggtgttgaaattccatatgaaaaaggcttgaaaggtcatagtgatgcagatgttttgttacatgcaattattgaaagcatcattggggcgatgggattaggggatattggtaaacatttcccagatacagatcctcgctataaaggaatatcatcaatgattttactagaacatacttatgagatgatgaaaaaagaaggttatacaattgggaatattgacagcattattatgtgtgaagaaccaaagatggctcctcatattatgcaaatgcgtcaaaatgttgctgaagttttacattgtgatatcacacaagtgaatatcaaagcaacacgtggagagaaacttggttttgtgggaagaaaagaaggcattgtttctcaaagtgttgtgctattaaataaggaagggttataaatgatggataaagtaagagtaagatatgcaccaagtcctacaggacatttacatattggtggtgccagaacagcattatttaattatttgtttgcaaaacattataacggagattttattttcagattagaagatactgatattgaaagaaatatcgaaggtggagaagctagccaattagaaaacttaaaatggttaggaattattcctgatgaatcacctttaaatccaaatccaaaatatgcaccatatcgtcaaatggaaagattagatatctataaaaaatatattgatatcttacttgaaaaaggatatgcctataaatgtttctgtactccagaagaattagatgcagaacatgaaagacaagtggctgcaggaattgcaccaaaatataaccgaaaatgttgtgatttaacaccagaagaagtcaaagcaaaagaagaagctgggttaccttatacaatcagagtgaaagtaccagcagggaaaacatatgaatttgatgatatgattagaggacatgtgtcttttgaatcagaagatattggtgactgggttttaattaaagccaatgggattccaacatataactttgcagttgtcattgatgatcattgtatggatattacacatgtttttagaggtgaagaacatttaagtaatacccctaaacaattaatgatttatgaaatgttaggatggagtgcgccaacttatggtcatatgacattaattgttaatgaagatagaaagaaattatcaaaacgtgatgaatcaatcatgcaatttgtttctcaatataaagaagaaggatacttacctgatgcaatgtttaactttatggcattattaggttggtctccagaaggagaacaagaaatctttaatcatgatgatttaattaaagaatttagtgaaaaacgtttatctaaatcaccatctatgtttgataaagaaaaattaaaatgggtgaacaaccgttatatcaaagaaagatctttagaagaagtagttgatttatgcttaccatttttaagtgatgcttatgatttatcaaatcatagtgaacaatgggttaaagatttagttgctgtatatcatgatcaattatcatatggtaaagaaattgttgaacttgtttcattattctttgaagatgaattacaaatagacgaagaagctcaagaatttatgaaagatgaatcaattccaaatacattagctgtctttaaatcaaaattagaagaactatctgatgctgattttacaaaagacaatatccaagcatgtattaaagcaactcaaaaagaagcgaaagctaaagggaaaatgttatatatgccaatccgtattgcaacaactgggattatgcatggtcctgatttagcaagttcaattatgttattgggtaaagaaaaagtattatcaagattatagaatagcctaggctattctttttcttttataaaaatatgaaaaaatgtaatgttatgttgaaatttgtgataatcccgtgagaaaaaaagatgagttggacacaaagatttcatattcaagtgatataattaacattggaggtgaatgtcatgcaaaatagacttattatttctatattaacagcttttattttaatagatgctcttttgatatatcttgtattgacaatttcaccaatcagattaaaaagagaaagttttgtttatcaatatggtgaagaaattcctgttgatgttgcagaatatgtgaatgccaatccatcggttttacaaaatgtcaaattagatttatcttctgtttctaaagaagtagggacttatcctgctacaattgagtactttggtaaaaaacaaagttttcaaattcaagttgttgatacgattaaaccaaaagtacaattaaaacaagttcaatttaatattgaagtaggacaaacaatcaaagctaaagatttgattaagaaaattgatgatcaatcaaaaacaactgtctatttctatgatgaagaaacacaaaaaaaatcaaagagtaaaacattttacactgaaaaatcatatattgaaaaaattattgtagaagatgcccatgggaatcaatcagctgctttacgtgtcaagattgttgttgaggctaataaagttttaccaattattagtggggtaaaagatgaagaaatacaaattggtgaggtattggatttaaagaaaggtgttaaggcaattgatgatattgaaggagatattacttcaagaatgattatcagtggtgaagtgaataatcaagttccaggcgtttatcaaattgtatatacagtcagtgataaagatggtaatataggaaaagctgtaagaaaggtaactgttttagaaaatgatgataactaatatatttttattgatttgtgcaggagtatttgtttatattcgatttattcaaaaagatgatatgatggctacggctatgaagttaggggctttttatccaccagctattgtcgaggatcatcaatattggcgctttataacatgtcattttatacatgttgagattttccattttttaatgaatgcttatgctttctatcaattaggaagattctttgaagcattattgggaagtgtttgttatttgtttttgattttagtgtcaatgcttttaagttcattgctttgttatagtgcttcacaaatatcatcgcgatattattatacaatgacaataggggcatcaggggttgtctatggtttctttggcgctattattgctttaggatatttagtgggtggaccatttatgtctttattagagagttttgcttatgtcattttaattaacttagcttataccttgtttgatcgccagatttctaagactgggcatttgggtggtcttattggcgggattgttgcaattgttattttattagcattgaggattgtatgagaatattagttgatggcgatgcttgtcccaataaaacagagatagcagccttagcaaaaaagtatcacattcctatgcttgtttatattgattatgcccatgaattagttaacgattattatgaagtgattcaatgtgcaatagggcatgatagtgtagatttagtgatgatcaaagatgttcaagtaggagatattgcgattactcaggattacgggttagcgagtttattacttgctaaaggagcaacagtgattcatcctaaaggcatgattatagatgaacataatattgatagttttcttatgagtcgctttattgcggctaaacaaagaaaagctcgtcaacgtttaaaaggcccttcagccagaacaaaagaagattgtgatagatttttggatgttttagaaaaaacagtgataaaaacaagtgatttttaaattaaaatttgataaatattgacagttgaagatgtcaacgttaaaataaaagtacaaacaaggcaaagttgttgaaaaacaatgacgcaaaactatagggtctaaactttttaagtatgacagccagttgcactacaataatgattttgtcgtggacatataaattcatatgttcacttttttaataaaatagaggagagatagaatgaggaaagttataacaacattgatttgctgcttcgttttgctgttgaataccatacccatacaagcaaaagagaaaataaaagttgcttttccaattcagccggggttgactgaattaacacaagatggggaatttacaggatatacgtatgattatttaaaagaattagaacgttttacaaattttgaatttgaatttgttgtttatgataaagaagatgttaatgataatattgttgaagctatgaatgacgtagctaagggtaaagttgatatcatgggtggtatggtttatagtgaatctatgacagatacttatgattatacagctactaactatggaacaagtaatatggttttatatgtaacatctgataaggctgaattaaatgaaacaagtatttattcagcaaaagaattaacagttggagttgtttctacaaagaaggtagaaaacaagaatttaacagaatttggtgaaacaaatggaataaagtttaagcaagttttttattcaaatattgaagatatgattaaaggtttgcaagctggtaagattgatgcaatggtaggaactgatttatctattttaagtgggaactatcgtattattgctaagttttttccacgttctttctattttgtaacaacgaaagggaaaacgagtcttatttctaaattaaatagtgcaatgatggatttaaataaggaacaacctaattttatgagtgaattgcatgaagaatatttttctatgaaaaatgttgaatttaatttaacagaactagaagaaaagtttgtgaaagataatccagtgattgatgttgctgtattaggtgggagagcaccttatcaatctaaagataataatggaaaattgaatgggattacaattgaactattggataatattggtaagttaagtggattaaagtttcattatgattatgctgaaacgtatgatgagtatcaggaacttttagctaaaaagacttatttaatacaagctggagtaacttatccttattcagattggaatcaagactactctttatcaaaatctttcttagaagcgaacatgtctttggttattaatgataaagtatcaagtagtgatttaaaaggaaaaaaacaagcttcaatcaaaggtttgcaatataatggtgaatttcaaggtgagatagaatattatgaatcaacattagaagcatttaaagctgtcatgaatcaagatgcagattatgcttatataaatagttatattgctgaattttataacagttattttcaatcaaatgatataagtattcttccacaagaaaagaatcacaaacaaaatatttgtttctctattcataaaagtacaggaacaacactattaagtattattaataaaggaattgatgcatcatcttataaaatgcaggatattatttttagaaatgcaacatatgttaaagataatacatcatttagtgattatgttaaaaataatcctgagcaatttttattaacgattactattattttaggtttgagtgtcttttttagatattatatgaataagaaaaacagtaagaaaattctaagagaatatgagcgtttccaacaaatcagtgatttatcaaaagattgttttattgaatacaacgtgaaaagtgattgtttaacattaagtggtggtggagctaagttaatttatcctgaatcaacatatgaacaatatattgaaaagaaagcgattggatatgaacaagttgaaagatgtattcagactcataaaggaattgttgtagaagaatatgtttcttttgttgatggatcaagacattggcttaaaattatacttcagcctattttagatgataatggtcatgtcaatcgtgttattggaaaagctacggatattcaaagtgaaaaagaagaacaattattgtggaaagaattagcgcaaaaggatggattgacaaatctgtataattcttctgccagtcgtgaacaagttgaaaagttattaaaagatgctcctgataatgcaattgcattaatgattattgatgtagataattttaagaatatcaatgatcaatatggacattattctggggacttggctttacaacgattagctcaagtgttatcaagtgttgtttatttagatgatattgttggccgtgtgggtggcgatgaatttattattgcgattaaagaaccacagagtgaagaagttatctttaattattatcaaagtattattaataagctagaacaatatgatgatatccttacaacaattagtattggagttgcattttctaaacaaggaatgagctatgatgatatttatcgaaaagctgataatgctttatatgatgtaaaaaatcatggtcgtaatggctgtagaattgctaatgatttatagaatagaaaagaacgaacatcatgctcgttctttttttcgatataaaattaaacacataagggtaataagacattcactgataggaaatgataaccaaacgccagttaatgagaataatattgataggatcataaccaaaggaataactatcaaaccacctcttaataaagaaataaaaaatgaaggcttaaacttttgaacagaagcaaaataagaaacaaaaatcatattaatacctgcaaaaaagaacccaaagaaatataaaggtaagccttgtatcgcaatattcatcatcataaaattattctcactgttaaagatagaaataatccattgagggaacagcataatgcaactataaacaagcatagaaacaatgaaagaagtcattaaagaataacgtaaataagcagacatcaacgaagtattcttttgtccatgactttgactaagtaatggctgtactccttgagcaattcccgtatataaagaagtaacaaccaaagctaaattactaataataccataacttgctaccgcaatattaccaccaatagataaaataaccatattaaatacaaaaacaataatcccaccagataactcagtaataaaagaaggaatcccaacacttattatctgataaaccttattcttattaatttgacaaggaagataatgaaaataattttgtttccataaaacatgtaaactacaaatcaataaagttataataggagaaaaaccagttgctaaggcagcacctaccattcctaattgacatggaaaaactaatatataatcaaagacaatattgaataatgttccaagtaacatcgcaatactagccaatcttggattgttgtcatttctaataaatgccacaacaatctgctgtaagataaaaaatggggtaaaaataatataagcttttaaatatgctgaagcaattggaataatttcttgattagcacccataaaatgcatgatgttttcagcaaacaagaatcccataacagcaataggtatagaaatcatcaaagctagcttcatagcgatactaaaatataaagaagcttctttcgctttgttttgtacttttaagatagaaaaatgcgtggcactccccactccaattaacaaaccaatccctgtaataacattatataaaggaataataagatttaaagcagccaaacccatacttccaaccccattggcaataaataaggtatctgcaaggatataacaagataaaccaatcatacttaacatattaaaactcacatactttaaaaatatgaattgtcttttcataagccacctccctatgctataataaactatagtctaaccctatagtcaaggagaaattttatgtcacaatactatcaaacctattatacaactggtgaatttgctaaactttgtcatacaactaaagaaaccttatttcattatgatgaaataggcttattaaaacctaaaatgattaaagacaatggctatcgttattatctatctattcaatattttgaatttgatttaattaaagtcttacaagaagcaaatatgtctttaaaagaaataaaagcatttatgatacaaagaaataatcagaactttgttaatattttacgagaaaaatcacaggaattagaaaatgaaaagaaacgaattgataatatgcaatatcgtattcaacaagctattcaaatgacagaatatggaatggaaatgcaacatatggtaccatttattgaagaatgtgaagctgaacatcttttaacaatcgctgtacctaataaagaattaactgatcgagaaatgatggattatgtaagtgaacatcttgaatattgtcatagtcaccatttaactgaggaattacctttaggaacaattatttatcaatcacaattattacaaaacaattatcaggaaaatagatattatgtgagattaaatcaagcttttgatgatcctcgttactggttaaagcctcaaggaatgtatgcaactattttacatgaagggttttatgatacgattgatgaatcttttcatatattatttgattatattgaaaaagaaggttatcagattattggggatgcttatgaatatgaaattcatagttattttacttcattagatcaagatcaatatttaatttctttatctattcaagtagacaaaaaataaaaaatcatttaatatgataaaaaatggaggaagattatgaagtataaattaatagcgttagatttagatggaacattaaaaaattccaataatgaaattactgaaaaaacaaagaatgctttaattaaagttcaagaattaggagtaaaaattgttttagctagtgggagacctacaccaggattacgtcatgaagctaatgaattggaattagaaaaatatgagggatttattttatcttttaatggtgcaagagttgttgatgttaaaacaaaagaaacaatttatgaacaaacattaactattgaagaagctaaaaaggcttatgatcgtgctaaagaatttaatcttgcatgtatgacatatagccaagatacaattttaactgaagatattgatgatgaatatgtttgtgttgaagctaaaatcaatgatattgaaaaacaaaaagttgaatcttttaaagcttgtttaaaagatcctattcataaagtcttattaactggaaagccagattatgtagcaagtattgaggaagaatttaagcaaccatttggggatactttaagtatttatcgaagtgctcctttctttattgaagttatggctcaaggaattgataaagcagcgtctttagatagacttgctcaatcattaggaattaaacaagaagaagttatggcatttggtgatggcttcaatgatttaagtatgattgaatatgctggtcttggggttgcgatggaaaatgctgttgaaggggttaaacaaagagcgaatgttattacaaaatctaatgatgaagatggaatagcttatattttatcacaagaatttgaaggagttgaatattaatgttaccacaagatccagcgatgttgttgagttatgtgaatatgaaattaagagatcaatatgcttctttagatgatttatgtgacgatttagatatttctaaggaagaaattgtagaaaaactaaaatcgatagactatatttatgattttgaaaaaaatcagttcaaataaattttaagctgtgctataattggggaaaataagtggaggataagaatatgttaaaattagaacagtttcaagaagcaaaaaagagagtcgatgaagtcattattccaactcccttaatatatagtgaagctttttcaaaagaatgtaagaatgaagtatatattaaaccagaaaacttacaaagaacaggggcatttaaaattaggggagcgtacaataagattgtcaagatggatgatgaagctaaggcaaaaggtttaattgcctcatcagctggaaatcatgctcaaggtgttgcctatgcagcacataaattaggcgttaaggcaactattgttatgccaaaacatacacctttgattaaggttgaagcgacacaatctcatggtgcagatgttgttttagctggagaggtttatgatgaagcttatcaagcagcttgtgatttacaaaagaaacatggttatactttcgtacatccttttaatgatgaagatgttattgaggggcaaggaacaattgcattagagattttagaagaattacctgatactgatattattttagtaccaattggtggtggtggattaatttctgggattgcttgtgccgcaaaattaatcaaaccaacaattaagattattggggtagaaccagaaggtgcagctagtgctttagcagcaattaatgaagatcaagttgttgctttaaaagaagcaataacaattgctgatggaacagcagttaaacaaattggggaagtaacatttgattatattaaagaatttgttgatggaatcattactgtctctgattatgaattgatggatgcatttttgttgttggttgaaaagcataaacttgtagcggaaaattctggtattttatcactagcagcattgaaaaaattaaatgagaaaaataaaaaagttgtttctttaattagtggtggaaatattgatgtaatgactatctcatcaatgattaataaagggttgattgctagaggtagaatctttacattctctgtacaattaccagataaacctggtcaactagaatatgttgctaaagttttagctcaatgtaatgcgaatgttattggggttgatcataaccaatttaaaaactttgctcgtttctctgaagtagaattacgtgttacttgtgaaacaaatggagagagtcatattcaaaaaatcattgatacatttaatgaagaaggttatacaatcacaagaattaattaattatttgataaagggttcaaatctttttaatggatttgaatcttttttttaaaataaaaagaaaaattgaatttttttgcgtatataagtagtagggaaggtttttagtacatatgatcttaaggactctttttatgttttctatatctatttactataagcaaatattgttgtataatctttgtatgagaaatccttccctagaaagaaggtgttctatgactacaagtgttctagaaaaaagtttgtcctatgatgatctcattgcctcgcttaggctgattgatgatgactttatgagaatcatcttcaagaatcaggattgtatccagctcctcttggatatcatccttggtgagcatgtggaaatcattgagaatgattcccagtatgaccttaagaatctccttggcaggtcactgacaattgatgtattggttaaagacaataaaggaaattacatcaatatcgaagtacagagagatgaagcaggtgcccatcccaagcgggcaaggtatcatcagagtctgattgattcatttctaagctttccaaatgagaaatggagagagattccaaagacaatcgttatattcataacggaggaagatgtattgggatatgatctacctatctatcatgtgagaagaaggattgttgaaaatggagaaagctttgatgatgaaacggaaatcatctatgtgaatgcatcgatacaggatgatagtgagctagggagactgatgcatgactttatgtgcaaagaagttgagagtatgaattatgaagtgttgaagaaacaggtagggtattataaagagagtgaaggaggaaagagagagatgtgtgaaatatggcagaagataagagatgaaggaaaaatggaaggagagatgaataaaacgattgaatttataaagaagttaactacaaagaatggttgtactattgaggatgccatggaattattggatattccaccagttgaacgtcaacaataccgacaaagaattgtttcataaataataataagattcaaatagactatttaaagttatttgaatctttttttaatcatataaagagaaaaacatgacgtttaaagagaatcacaaacataaaagaataaaaagaatataatgaatttaggaaagggatgagaccaatggattgtgaatgtgttaaaatgaatatataaggaggacaatgatatgaacattgttattgtggatgatgaaccaatgattttaaatatcatacaaaagcaactccaatatattcatgataaagatattgaaacatacagctttacaagtattcaagatatgcaaaaagcaagagttcctattgatttattattattggatatagatatgcctgactgtgatgggattacttattctaaagaacatcgtgatatgaagattatttttgtaacaagtcaaggtcaaagaatgaaagaagcatttggatataatgtttatggttttgtagaaaaagatcatttaaaagaagaattgtgtcaaaaggttattgaagtgattaaggaattaaaacaagaaagaactattgaattaaagactgatttaggttgttttcaattttatttgaaagatattgtttatggacaatatttatcagatcgtagaattagttttgtagttaatcaaaaatcgtatatttataaaggaaaaacatttaaagagtttgttgaaatgttaggtgatggattttattttattgatagagatacttttattaatatggatcatgtgattggaattgttaataatcaagtgatcttaagagatattcatcaaaaattaattataagttcaagaaggcaaaaagaagttaaagatatcttcttgaggaggaaaagaaaatgacatacctcatattttatatcagtgggttgttttatgttttaggtttaacatttagtatttatcctttccttcatcaaaaacgatcaattctacaaattattatattattatgtgtttattcaattctttattttcttatcagtcaaacaatcttaatatttgaacaaagtgtcctcatttatgtattaaccattctactagattggttaatgatgagctggctttatggtaagctggaaaaatggatcatgttttatacaactttttatctatgtcagtatcttatagtttttagtataataactcaagttttaagaacagttcatttacaaccgattttatttgttagtttacttgctaatgtgattattgttgtagaaatcaagattttgaatcaatatcatatgatggcagattatgaattggttcaagaacacgaacttatttatgatttaattaattttttaatgatatccattgtttatatcttttatagttttaaaggaagttcattacaaagtagatatattatctttatttatctattattaatgagtttatggatttatttacttatgataatgagtcgaagtttttgtttggcgaaagaaaaagcagaattaaaagtcatgaatatgtataaccaaaatgttgaagattatgtaatgcgttatatgcaaagtcatgaacaaataagaaaactaagacatgatttaaaaaatcatctattcatattaaagaacttagataatactcaacaaattcatgaatatttagatcaattatcatcaaatatgccattacttttagaaaatcaagaaacatttagtgggaacccatatattgatgcttgcttaaatattaaaaaacaaacatatcccgaagttaaatttcaatgggatttacaagtgcaggatttaaatatgccatgtactgatttatgttcgctcttatttaatttattagataatggcgcaacagcagctatgaaagttcaaggaagtgtagaattacaaatgatttataatcaaggaaatcttttgattaatgtaagtaatgattgttatgaagaacctgattttacatcacatgaggataatcatggttatggtttaaagattatccatgaaattgtttataagtataagggggctattgaaatgcgttatactgatcataaattatatgtggagatttgtttagaagtatgagtcagactatgaagaaatttttgagtatctttgttattgcaagcttactcataacaataagtacttcatcaagtcccctcattatatcaatgttatcaatgtttacaaatacaatatttaatatccaatttggattattcttaatgattgtgtacttcattattgtacaaaaatatgaagttaacataaaagatatacaaacaatgatattgacttgtattttattacttgtcttaaatctatttattaataacacagctttttctacaatgaatgatttatatttagtaagagatagttatcttataagtatgatattatttaatgctgaattatggttgaagaagaaaggcatatcaataaattatcattatttattgataatgatttgtttagtgattattggaataacctttattgagtatcaactaaatagtactttacattttattggagttggaattgcacaattgattatgttgttttggttaaattgcttacaagaacatcatcaagttgaaaagaaagatataatgattcacttattaatattagttgttatcatcactatcttactacaaggttatacaacagatattatattgattacatgcgtccatcttttgacattatgtttcattgaatttatgagatttgttcttcccaaaaaatatcaaatctatcaaggcatcatctttgttattatctttatgattttaaatgtttatattcttccaatccatcataattcacttcttattttcaatgaattcattagacaatcatcaattgttctaactggtttagctatatacagtttaaaaaataaatatgcaagtattattatagctataggtttaggaagtattgttatttttaatcttctcatgtctagtcaactttctatggacatagttatctctataagtaatgctttaacatcaatggggatcttatggatatatccaaaagctataaaatcaagttataaactttgtttattagctgtcgctatgtttattatattaatgttcatttatgtgatacgtatgggaggataaaaaagcgaatatagtgattgaataaattttgtatttcatgtatttttttcttgaatattatagatatttctactatactatataggaataaggaaggaatgaggaaaaatgacaaaaaacactctttttaaaagtaactttaatcaattcagtgttgttaaaaaaagtccttttttcccattttttatatttgtttcataaacatatcattttatttgatatgtttttttatgaaagtcattaatcaatttaaggaggacgaattatgccaaaaagagatgacattaatactgtattagtgattggatcaggtccaatcatcattggacaagcttgtgagtttgattattcagggacacaagcatgtaaagctttaagaagtttaggttataagattgtgttagtgaattccaatccagcaacaatcatgacagacccagaaactgccgatgtcacttatattgaaccattaaatttagaaagattaactcaaattattgaaaaagaaagaccagatgcattacttcctaacttaggtgggcaatctgcattaaacttatgttctgaattaaatgaagctggcattttagaaaaatataatgtgcaagtcttaggagttcaagttgatgcgattgaacgtggtgaggaccgtttagagttcaagaaagctatgaatgaactaggaattgaaatggcaaaaagtgaaattgctaatacggtagatgaagctttagcaattgctgaaagacttggttatccggttgttgttagacctgcttatacaatgggtggtgccggaggaggacttgtttacaatgttgaagaattgaaaacagttgtttctcgtggtttacaagcaagtttagttcatcaatgtttgattgaagaatcaatcttaggatgggaagaattagaagtcgaagtagttagagatgctaaaaataacatgattactgtttgcttcattgaaaatattgacccattaggtgtacatactggagattctttctgtagtgctccaatgttaacaatctctcaagaatgtcaagatcgtttaaaagatcaagcatttagaattgttgaatcaattggtgttattggtggaacaaacgtacaattcgcccatgatccagtcacagatagaatttgtgttattgaaatcaatccaagaacatctcgttcttcagctttagcttctaaagcaacaggattcccaattgcattagtatcagctatgttagctgctggattaacattagatgaaatcccatgtggaaaatatggaacattagataaatatgaacctgatggtgattatgttgttattaagtttgcaagatgggcatttgaaaaattcaaaggtgctgaagataaacttggtacacaaatgaaagctgttggagaagttatgagtattggtaagacttataaagaagctttccaaaaagctatccgttctcttgaaattggtcaatacggattaggatatgctaaaaacttcaatgaattatcaaaagaagaattattaaagatgttaactgttcctacaagccaaagacaatttattatgtatgaagctttaagaaaaggggcaacagttgaagaattatttgaattaactcaaatcaagcattatttcattgaacaaatgaaagaattagttgaagaagaagaaatgattaaaacataccaaggaaaagatttacctgtagatgttttaagacaagcaaagaaagatggattctctgataaatatttaagtcaaatcttaaatgtagaagaaaaagcaattagagatgaaagattagctaatggtattaatcaagcttgggaaccagtgcatgtcagtggtacagaaaatagttcatattactattcaacatataatgccgaagatcatagtgacatccatcatgataaacaaaagattatgatcttaggtggaggtccaaatagaattggtcaaggaattgaatttgactattgttgtgtacatgctgccttagcattaaagaaattaggatttgaaacaattattgttaactgtaatccagaaacagtttcaacagactacgatacatctgataaattatactttgaaccattaacattagaagatgtattaagtattcatgataaagaaaaaccagttggagtcattgctcaatttggtggacaaacaccattaaacttagcttctcaattaaaagaaaatggtgtcaatatcttaggaacaactcctgaaacaattgatatggcagaagatagagatttattcaatgctatgatggaaaaattaaatattcctatgccagaatcaggaatggcagtcaatgtagaagaagcattagaaattgctaaacgtattggttatccactaatggtaagaccttcttacgtattaggtggtagaggaatggaagttgtttatgatgatgaatcattagaacaatacatgaaagctgctgttggagttacacctgatagaccaatcttaattgatagattcttaaataatgcaatggaatgtgaagcagatgctattagtgatggtgaaaatgtctttgttccagcagttatggaacatatcgaattagctggtatccactcaggagattcagcatgtatcttaccatctcgtcatatcccaatgagacacttagcaacaattaaagaatatacaaagaaaattgcaaaagaaatgaatgttcgtggtttaatgaacatgcaatatgcaattgccgatgataaagtttatgtcttagaagctaatccaagagcttcaagaacagtacctttggtatcaaaagtatgtaacatcaatatggttaagattgcaactgatatcgtaacaagagaattaactggtagagattctccagttcctacattaacagaaaagaaaattcctcatattggggtcaaacaagcagtcttcccattcaatatgttcccagaagtcgatcctatcttaggacctgaaatgagatctactggtgaagttttaggacttgcaagttcttatggtgcagcaatgtacaaggctgaagaaggggctaaaacaatcttaccaactgaaggaaaagttttattcagtgttaatgatttagataaacctcaaatcgttgatttagcaagaggatattatgatgctggatttgaaattgtagctactggaaatacttataaattaattaatgaagcaggaattccagtaactaagattaagaaaattcatgaaggacaaccaaatatctcagatgctttaatcaatggagatttagcaatgatcgtcaatacacctcatggtaaacaaagtgctcatgatgatagttatatccgtaaaacagctatcaagatgagaattccatatatgacaaatattgctgctgcaaaagcatcattagaaggtattatggaaatgaagattcatggtagccatgaagtcaaatcattacaagaatatcacaaagcaattaaataattatcaaagaagtcacaatttatgtgacttttttgtttgaaaagatagcttatgttgccagaaactggtgaaatgttgactatattttaatatttcagtataatatcccatctttgacaatttataagcaataaaagtcctgaacccaatgtgtataaagggtttcaggactttttggttctgtaacgaatatgcgtaaattattatttctttgtattttttataatatttctcattttctttttgcttgtaatttcataatcggttctaaatccaaacttataatgcagctcatcggttaattgtgttcttgtgtatgctggaatatatccgttatactgtgtgtcaaccaattccatccctctaattgtctttaatatttctgtagctgtatatttattgtctaatatattagccaataagcgatagatgatgagtgacataaagcacgttagaaagtgtgcttctatcctttcttgtttttgtaagtgtactggtcttgccttaaaatcagttttcatgattctaaaacattcttctatttgccatctttcctctgaaacattgataatggcttggatatcatcatcttctagattagtagatactgcatagaaaccatcgtacattgcttcattatctatcttctcttgatttaaatgatagtattcttcaacagcgactccgttttcatcagtcgttattttttctataaatctggatggatcgttaggattacgtgttcctttttttaattttccgttagaacgtatcttattcatcgctctttggacttgcttatctctaatcttcttttgataaatagcatatttaggtgaatatgtaataattaatcgttccttgataggagattctataggcaattctttatagaatactctattgagattatcttcacaattaaattcaatatcatcaatattgattcttttagaactcttacttcccagttctaaaaatcccgtatgtctaagtgcgacttcacgatcatctttctttaatttttttaaagattgtgtaatgatataagctctattctgtatactattaaattgtttattcgtttgtgacgctaaaccgctgtcactgcagtaaacaaattgacctaattgaaaatccttaacgattctttcttcaagcggttttaatgtgacttgttcgttcttgtttccttcatataaatcaaaagccaagggtataccatcaccatccatcattaatcccatacctacgataggattaggtctgttttccttgcctttaccatacattctaaatccatcatcttcttcaatttcaaaataataatttgtacagtcataatatagcttactgccatctctcttcttaatgtaatttgtattcctgtaaagttcagattgtatatagtctgtttccttagaaagaatagataatgcacgataaatatcatgtaattcatatttaggcttttctaataaggtagaagcaaattcatagctagatcgtttactgctgggacatagaatcctagaatagattagatccgataagattgcatccaaatcatatttgaacttatatcttgctttaatgtttctacatatattgttgatttttaacttgtaataaatatcttgcagaaatagataaccgcaattatacttacgattactgtttggcttaataattctatcaggggagaaagcaatgatagtatcatgattatcatccttttctttttgagtaagttctttggcgtattgtttagcccaaatgatcaattcatcacgagacatattcttttctttacataagtcatctatcttacctaacttttcgtatgtctttgaagtacgtgaaccgttagaatatatatctttgataatataaataaattcatagttttttgatttactgatagtcactctcataatatagcctccaatacttataaatctattatatcatatattacgatgaattacgatataaaagtaataaaaagttgacaaaaaaataaagcatctatcaatgctttttgaattataaacatatttaactgtcaaagacccggtagtcatgaagtcaaatcattacaagaatatcacaaagcaattaaataattatcaaagaagtcacaatttatgtgacttttttgtttgaaaagatagcttatattgccagaaactggtgaaatgttgactatattttaatatttcagtataatatggaagtattaatttcttaaaaaagatgattagaggaagaaaaaatgaaatatttgaaaaagggaaagtatatcattggttgtttagttattgttttgattggttttttatttgttcgtatttttacttatcacccagtaaaatcacatattgagatagaagctggggcaaaagaattaaaggtttcagatgttttagaagatcaagatgctaaggctgtgattaaaaataatctaacaactgaacagttaaagacagtaggagaatatgaaattcaagttatcgttgatgataaagaatatacatgtgcagtgaatgtgaaagatactacagctccaaaagctgtccttcaaacagtaaaaatctatcaaaatcaaaagattgaaccaaaaatgtttattaaagaagttcaagatgtttccaaagttagtattaagtttaaagatgaggtcaaaacatcaagtcttggtcaacataaagttacactcattttagaagatgaagcaaaaaacaaaagtgaagtcacaggggagttaaacgttatgaaagataaaacacctccagtgattaaaggaacaaaagatattattgtgacaaaaggaaagacagtttcttataaaaaaggagttactgttagtgataatgttgataaagatattgaattagaaattgattcttcaaaagtaaatctaaataaggttggaagttataaagttgtttataaagctacagataaagctggaaatacaacaaaaaaagaaattaaagtgactgttgaggcacctgtacctaaagcatataatttagaaactgtctataaaacagcagatgcaatattaaaagggattattaatgacaatatgacccaaagacaaaaatgtcaaaaaatttataattggattcatggacatataggatatgttgattattctgataaatcatcttggacaaagggagctatggatggttttaataatcgtagaggagattgttataactattttgcaatgagtaaagcattacttaccagagcgggaattgaaaatattgatttaaaggctacaaaacataaacattattggaactttgtaaaggttgaagaaggctggtatcactttgatacaacacctagatgggatcatccaaatttatgcttaagaacagatgcttggatgaatagctattcagtgaaaaatgataactgtttttcatatgatcctgccagtaaaccagcctctgcaaaacgttaggttgattatatgaaattaggaattataggtggtttagggcctttagcctcctcatatttttatgaacttttaacaaaaatgagtgatgttcatcatgatcaagaacatttagaaatatatttacactcttgtccacggattccagatcgtacagaatatatattagatcatcgcaagcctagtcctattcttgagcttattcaagttgcaaaggagttagaagctgctggtgttgatatgatagctattccatgtattactgcacattattttcatgaggaattatctcagtcagtagatattccaattattcatttgattcaagaagtgagaaactatattttaagaaaacaagtgaaaaaagttggaattatggcaactgatggaacaattcaaagtcaaatttttcaaaaagaattaaaggagtataatattgattgttgtattccaagtattgaatatcaaaaagatgtaatgcatattatctatgataatgtgaaatgtggaaaagcgattgaaatgaattgtttttatggaatagaaaaggatttattattaaagggagcagatttaattattttaggatgtacagaattatcaattgtcaataaagaagaaaagctagattcattgtatttagatgcaatggaattattatcagcggtagctttacaaaaatgtcaaataccaataaaaaaagaatatcaatatttgattaaataaggggaaaatatgcaaacaaatgtattagattatttagaaaaaacagtaaaacttgtgccaaataaaatagcatatgcaaatgaaaaagaatcattaacctttattgaggtttataactcagctaagtcaattggttcatatattgcatcttttcatttatgtaaacaaccaattgttgtttacatggaaaaatcaccatcagccattagtgctttctttggtgttgtttatagtggtaatcattatgtaccgattgatgaagaaatgccacaatatcgtgttaaattaatttttgatacattacagccacaaatggttatatgtgatgataatacaaaagctcatttagatgaaatgaattatagtggaaaagtttgtttatttgatgatattaaaacatatacaattgatatgttacaattacaacatattaaagaacaaactttggatattgatccactctatatagtttttacttctggatcaacaggagttcctaaaggggttgtagcctgtcatagaagtgttattgattatattgaaaacttatcagaagtcttacaaattcaaagtgatacagtttttggtaatcaagctccactttattttgacgcttgtttaaaagaactctatccaacacttaaatttggagcaacaacatatctagtgccaaagaagttatttatgttccctgttcaactgattgaatatttaaatgaacataaaattaatacgatttgttgggttgcttcagcattatcacttgtttctggttttaaaacttttgagacagtaactcctaaatatttaagaacagttgcttttggtagtgaagtgtttccaattaaacaatataacgaatggaaaagagtcttaccaaatgctagatttattaatctgtatggacctacagaagcaacagggatgagttgttattatgaagttaataaagagttttctattgatgaagtcattcctattggaaaacctttccataatacagaaatcttacttctcaaagatgacaataccctagcaaaaggtcatgaggttggagaaatttgtattcgtggaactgctgttacattgggttattataataatccagaaaagacaaaagaagcatttgttcaaaatcctttaaatcaggcgtatattgatattatttatcgtactggtgatttggcttgttataatgatgaacatgatttgatttttatttcaagaaaagattatcaaattaagcatatgggtcatcgtattgaactaggggaaattgaattaaatgttcatgagttagaaggaacggttcataattgttgtatttatgaccaagaccaagaaaaaattattttatattacgtgggtaataaagaaacgaaagaagtaaaagcttatttaaaagctaaattaccacgttatatgttaccaaatcgtgtgattaaattagaacaaatgccactcacaccaaacggtaaaatagatagaaattatttaaaaaaactatataaagaaaaggggaaaatttaaatggatgaattgttagaaattttagaggatttacatgatgatgttgattttacaacttgcacaactttaatagatgataagattttagattcttttgatattgtgacaattgtagcggaagtgaataatgtttttgatgttcaaattcctgccgaagaattaaaaccagaaaactttaattcagcaaaaagtttatatgcattaatcgaacgtttggaagaagaatagtatgttatttacgacttatcaatttgctttatttgtttttgttttatttgtcatttattatctagtgaataaaaaatatcaatggattattttacttattggcagttatttgttttatgcttatgcaggagtgagttatttattttactttttaactacaactctttcaacatatttgatttcacaaagaattaaagttgtaaaacaaagacaaaaagaatatatgtcacaacataaagaagaattaacaaagcaagaaaaacgtcaatataaagaagccatgaaggcaaaacagtggcattatttgcttttatgtttattatttaattttggtgttttagctgttgttaaatatactgattttatgattggaaatatcaatggaattattggtttatttaatggtcaaccattatcttttatgaattttgctttaccaatgggaatatctttttatactttccagacaatgagttatattattgatgtttatcgaggaacttgtcaggttgaagataatgtctttaaattaggtttatttgtttctttctttccacaggttattcaaggaccaattagccgttttaatgatttatcacaaaccctttatcaagaacatgattttgatttacgtcaaattcattttggatttcaaagagttttatggggatattttaagaaattggtgattgctgatcgtattttagttgctgtaaatactttgattggggatccatcaacttatgacggtatctttgttttggttggaatggttttctatgctattgagttatatgcagattttactggaggaattgatattacgattggggttgctcaaatgtttggagttcatttaactgagaactttgaacgaccatatttctctaaagatattgctgaatattggcgtagatggcatattactatgggaacttggtttaaggattatatcttttatccattatcaattcataagagtatgttacatttttcgacttggtgtagaaaacatatgccaggaggattaggaaaaagagtaccagtttatgtttctagttttattgtttggtttgcgactgggatttggcatggagcaagttggaactttatagtctggggattattaaactgtttggttatttgtgtaagtgaggaatttaaaccattttataaatggttccatgaacattttcatgtttcaggtaagttatattttagattatttcaagttatgagaacattcttattgatgagttcattaagaatattagattgttatagaaatgtgccattatctttttctatgtttggatcaatgtttactgattttcatatttcagagttgactggtgatgctttattgcaactgggattaagtcatattgattatatgattttaattgttggtgtgattattttaataacatttagtcttattcaaagaaaaggtagtgttagggaaaaattaaatcaaaaaccaatagtaagttttgtggttgattatgttttaatttttgttattgttttatttggtgcttatagtattggctatgatgcaagtcaatttatctataatcaattttaaggaggagaggaatgaaaaaagttattatacttatgctatcattatgccttatattgacatcattctttcttcttcaaaagttacttattcctaaatatataagtgatgttcctgaaggaagtttaattgaagaatattacaatgaaaaagtttttgatcatgatgttgttttcataggcgattgtgaagtttatgaaaatatttcacctgttcaattatggaaagattatggtataagtagttatattcgaggtagtgctcaacaattgatttggcaatcatattatctcatggaagatacattacgttatgaaaaacctgatgtttttgttttcaacgtgttatcaatgaaatatggggagccgcaaaacgaggcttataatcgtttgaatcttgatggaatgaaatggtcaaaaagcaaatggaatgcgattgaagcatcaatgactgatgaggagtcaatgattgattatctttttccacttcttcgttatcatcaaaggtggtcagaattaacaagcgaagattttcaatatatgtttgctaaaaaaccattagtttcgcataatggatttatcatgcgtgctgatgaattaccagttaaaacaattcctaaagatcaacctttatcagattatcagttttcaaaaacatgttatgaatacttagatagaatggtgaagttatgtaaagagaatggaattaatctagttttaatgaaagctccaagtttatatccaagttggtacgatgaatgggatgaacaaatggttgattatgctaaaaagaatgatttattatatgtgaatttcttggatagtattgaagaaattggtttggatttcaatcatgatacatatgatagaggattacatttaaatttaagtggtgctgaaaaattatcacattattttggtaagattttacaagataactttaatttaaagaatcgtcaaaatgatgaatcaattcgtcaaatttggcaagagaaagtttcagactataacaaaatgaaagatgatcaatatgctcaaattaaaaaatatggttatctaaaaggttatggggcaaaaactcaaggaggaaaagaagaatgaaaaaaataatttgtttattagtcgtttcagtgtttttcttagtgggatgttctcaagataagaaaacaacaacatcaaaaacaaatgaaagtcaaggatatgtatttaaagttaaagatgtagacattgcgatgaatgaaaaaactgatgattttataaaatcattgggaaaagaattagaatattttgaagcacctagttgtgcatttaagggattggataaaacatatacatatgctggtttccaattaaaaacttatccaaaagatgaagtagattacgtgaatgcgattgttttaacagatgatacagttaaaacagctgaaggtatctgtattggtgatagtaaagatcaggttgttgaaaaatatggaaaagattttaaagaaaaatcaggaggatatgtttatacaaaagataaatcagaactagaatttatctttgatggtgatagtgtaagtgctattacttatacagctattacaaaatagtaaaaaaggatcaattgatcctttttcttttactcaaaatagaaaagttcttcaaaagttttatctaatgcaatacacaagattaaggctagtttggctgttggattaaattgcccagtttcaattgaactgattgtttgtctagaaacacctaccatttgtgctaattgactttgtgatatatttttttcacttctagcttcttttaagtgatttcttaagattaatttattattcatatcatgttcctaaaataacactttcataatatcaataaaacgcataatatataagaaaatccaaacagctgatataaagatagttgttttatttttagtataataacctttaataccataaaaacaaaaaagaaaaggaataattaataaaaagcaaatatcagttataattgtatcaccacttaaaagaaaagccattatcatcaaaaacatagcaatcaacatcatcattgtaaaacccttaaacaaagctctactttcaaaaaacacttttccttcatccttttcattttgatatcgtcttaaaatttcttctttattcattgtttagcctcctaccatataatcatccatactttagcaatagtaaaacatgttacaataaaaaatataagtccaagaataaaactccatttattccttatataataataacgtgtccaaccataaatacaaagaaaagtcgaaaagagagtagcagacgtataaaatatttcagcttgttttgaactttgaaaagacaagatcatcattaaaatacaagaaataacaaaaataatagaagaatattgagttgttttattatcaatatattcattaatttcatcattcttttctaactgacttctttttaaaacttcatttttatccataaaatttcctccttgtagatcatttttaaatatcttgatttattattgacaagtattctttacatatattataccatgtcaagtatacttgtcaaaagaaaagattcaaaatcttttaaatgattttgaatcttaatctagattaagataaaattttatgaatatattttggtctttctaacatcggaatatctaataattccatagcatcttcaatagtacaatcattcttcgtagttaacttctttataaattcaatcgttttattcatctctccttccatttttccttcatctcttatcttctgccagatttcacacatctctctctttcctccttcactctctttataataccctacctgtttcttcaatacttcataattcatactctcaacttctttgcacataaagtcatgcatcagtctccctagctcactatcatcctgtatcgatgcattcacataaatgatttctgtttcatcatcaaagctttctccattttcaacaattcttcttctcacatgatagataggtagatcatatcccaatacatcttcctccgttatgaatataacaattgtctttggaatctctctccatttttcatttggaaagcttagaaatgaatcaatcagactctgatgataccttgcccgcttgggatgggcacccgcttcatctctctgtacttcgatattgatgtaatgccctttattgtctttaaccaatacatcaattgtcagtgacctgccaaggagattcttaaggtcatactgggaatcattctcaatgatttccacatgctcaccaaggatgatatccaagaggagctggatacaatcctgattcttgaagatgattctcataaagtcatcatcgatcagcctaagtgaggcaatgagatcatcataggacaaacttttttctagaacacttgtagtcatagaacaccttctttctagggaaggatctatcatacaaagattatacaacaatatttgcttatagtaaatatgcatgaaaaacataaaaagagtccttaagatcatatgtacaaaaaaccttccctactacttatatacgcaaaaaaatctaatttttctttttatttttgaaaaaaataaaagccatgattttaatcatggctctatagaaaggaaatatgtgttatataggagtggatttcaaggtctcagaaagtgactgaaaatctttcaaatctggatgagagagtgcgtgatcaaaattttcaatcatgggattaaatttctgaggatcctttttagccaattcttgataacgtcttttaacagctattggcattttgccttgacacatataggtcccaactaccaaattagattcatctataaaagctttgttacgatttaaaatcgcttcaaaatatgcttgactaccaccaaatccagcagttccaaagaggaatattttttgttggtgtagagattttaaaaatgtctgtacactttcatcacaaactcctttatcagtccaaaagccaacaaatatgatatcagcttttatttcatcataattcggatgaccaaaataaacacattcttcatctatataaaaatctctaatataattagctaactgtgcagtattaccggttttgctagaataaacaattgcatatttcattattaattcctcctcattttagatgtgttaacatatttgaataatctgcaattttgtctaatgtttgaaacagattttctttttcttcatacgataaacatgctaaaacgctttgatcccaatttctaaagaaatcatgacttaattgaaaaatttcttgacctttattcgttaaatacaaaattcgtgaacgtttatcattgggattaatattttgttgaataaaatgattttgttcaagttttgctagagaacgagtagcatgaccactatcaagtttcaaagctgtgataagtgcttttacattacatccaggatgtttaccaatgtaaagaataaagaataacaagccagaagatagaccagcatcacgtaattctttttgacaatattctctaaattgcctttgcattaagactgcatagaaggcaaaagagtgaaacataatatcaccgtcctatatctttctatgctcattatatggctgataactgacatagtcaactaatttgatgaaacaaatgtaaaaattaaacgaatgttaaggaatttttagtgaatttagtttataataggaacaagtagataaggaggagtatgtgtatggcagtatggataattctaggagttattgtattaatagttctttatattggagtgacttataatgctttaactaaggcaagaaatagagtgaaaacaaattgggctcaaattgatgttgttttaaaaagacgtgcggatttgattcctaatttagtggaaacagtgaaaggttatgcaaagcatgaaaaggaaactttagatgcagttattaaggcaagaaatacttatgtaaatgcctctttacctgaagaacagatggcagcatcaggagaattaagtcaagcattaaataaattaatgatgttaagtgaagcatatccagatttaaaagcaaatacgaattttgtctctttacaaaaagatttaaaagaaactgaagataaaattacttttgccagacaattctacaatgatagtgtatatgcttatcaaaataagatagaaatgtttccatcagttataatagcaaatatgtttggctttaaaccatttgccttctttgaagtagaaacagaagataagaaagttccagaggttaaattttaacaatgaaaaagagaatatattttatatcttctcttttgttatgtttattattttctttaacacctgttcatgccagtgaaacaataatcaaagatatgaatgttgaagtttatatcaatgaaaatgggagtgcacatattaaagaaatatgggatatgaatataacaaggggaacagaagtatataaggttatgaataatatgggaccttctcaaattaagaatttgaaagttcaggatgagaaaggttttgtatataaaaatattggtgattggaatgttgatgcaacgcgtcaacaaaagaatggtaaatgtggtttagtaaaaagagatgataattacgaattatgttttgggattggtaattatggtgaaagaacctatacatttgaatatgatgtgacgcattttgtaaaacagtatcaagataatcaaggactgaattatgcattttttagtgatatggatattagtattgaacatgctttgataactgtagcatctcctcatccttttaatgaagatacggccttgatttgggcatttggttatcatgggaatgttgtttttaaagataataaagttgtcttagagacagagaactctatgagtggtggaaaaatgcaattactcatgcgtattaatgatgggacttttgaaaatgcttatcaaactaatgaaaattttgatgatattttagcagatgcaaaacaaggtagcgattacgatagctataacaattatgatgaaaatgatgatcattattttattcctggaatgattagtcgaacaaatcgaacagttggtttatttatctttttaccatttgttatgtttttttgcttgatagtttttggagtgatttttgcggcgaagaaatatcgccaagaaccatctgtatttagtgattatattccttttagtacgaaaaatgtcaatatgtttagagatattccttgtcaaaaagatatttttgaattttattatttagctaaaaaggctggtttaattggagaaaatgatcgtggggggaatgattgctgcattgattttgaagtgggtgcaggaaggatatattcgttttgataaaagagaagaatcacatatggtattctttaagaaagatggattttctattgatttagataaatcaattccttgtcataatcgtttagatagtaagatgttacaatattttagagaagctgctggagaaaatagatgtttagaaacaaaggaatttgataaatggtgtagaaatcattatacatctattgattcatggtttgatgatattgattcttttattgaagaagaatatcgtcgaaaaggtttaatttctattgaaaagaccgatactcattttatgggaatgaaaatatctaaagatagagatgtgtttgatgcttctattagagaagaaatggaacatattgttggattaaagatgtttttagaagaaatgagtttaattaatgaaaaagaagttattgaagtcaaactatgggaagaatatttaatatttgcatctattttaggtattgcagataaggtacaagaacaattgggagaaatgtgtccaacatttaatcaacaatctaatttagatacaatttatacaatgcatatggtacatatgtttgcttataacagtatgcaggcatctcgtgcagctgcttcagcagctcgatcagcaagttcaggatttggtggcggttcttcatttggcggtggaggcggtggcttctccggtggtggaggcggaggtgttcgctaagaaaggaggcgtttatgaaacgctatgtaagtgtgatattagttatgggattgttgttatcggggtgtagtaaggaaaagaaagaagataaagaagcaccggttttaactttgaaagaaaaaagggttcaagtagaattaaattcgaaagtagattatcaatcttttattgaaaaagcaatggatgaggtagatggtgaattaatttctgttgttaaatataatgaaatagatacatcgcaaataggacaacaagaaattacatatacacttaaagataaagcaggaaatgaaacaaaacagacaatgatagtagatgttgtaaagtattttaaaaacaagatttttagtccaactcaagttcaaccagaaattgttaaaaatcctgaagatataacagttcttgtgaataaagttcatcaattaccacaagattgggaacctaatgatttagaaccaattattgatagtaagtttagatatctaagaaaagaagcgaatgcagcttttacaaaattttataaagcagcaaaagcaaaagggatagaaatttattcagtatcagcatatcgttcttatcaaaaacaaaagataaattgggaaaatcaagtgaaagtctttggtgaagaatatgcttctttatatagtgcatatccaggaagaagtgaacatcaattaggactagctattgatatttcatataagaatcaaggcgataatctgactgaaaaagtagcatcaagtgatattgggaaatttattgaaagtgatgcatataaatatggatttatattaagatatccaaaagataaagtatcaattacaaactatggttatgaaccttggcatattcgttatgtaggggtagatttagcaaagaaattacataaacaaggaataactttagaggaatattataaagaggcataggagaatttatggaaaaagcaaagttttacaaagtatcttatcaacaatttgaagaagggtatttagattgtcaaccacaagctaatcaagctgaaatacaagctgcttatgatgcattaaaattaccaaaacgagcaaccaaaggttcagcagggtatgatttttacacacctattgatgttgtcttaaaaccaggggaaacattaaaaattccaactggaataagatgtgaaatgaatgaaagctgggttttaatgatctatcctagaagtggattaggatttaaatatcgtttacagttaaataatacagtaggtgttattgacagtgattattttaattcagataacgaaggtcatatcttcattaaaatgacgaatgattctaatgaaggaaaaattgttgatgttaaagctggacaggggattgcccaaggaatctttatgcaatatgggattgttgaagatgatgatgtaagtgaaacacgtaatggtggttttggcagtactacaaaataagaaatagcgaaatcattttgaatggtttcgctatatttttttgtcgaattataaaaaatatgataattgtagataaataaggtttaaaaagttataatgttattaaatgaaatgaggtgataggatgaagataacatatttaaaaagacatcagaaaatattagattgtttagaaaaattagatgaacaaacatatgtaaccggaacagaactatcaaaattatgtgatgtttcaaccaaaacaatacgttcagatatccatgatatcaatacctttttacagtcaaatgctcaaatcttatccaaaccagggaaaggctattatcttcatatcctatcttcaaaatataaatcagaaaaagataaatatttacgtcaagaaggagaattgttagataattcgattcaacgttcatattatattatgcgtcaacttcttctcaatgatcaacctattcgcattgaagaattatctacacaaatgtatattgatcgtacgtcagtaagtcgagatatgaaatacgttagagaatatttatcaaaatttcatcttaaagttgaatataaagtaggtaaaggaaattatattattggtgatgaattacataaaagactttgtatggaagatatctttaatcaatacagtcttgatcaattaatcaatatagagattgatataaaacaacaaatgagtgaaatattggatcgtgatggaatttcaatgacagatgcatctttagatgatatggttaagtatttgtctattatgatgttaaggattaatgaaaatcattgtgtaaagatgtcagaagaagaaaaaacattgcttaaaagtgaatatgaatatcaggtggctagagatattgttgattttattaaaacatattatgatataaagattaatgaagaagaaatttgttttttaactgttcatttaattggtaagagaattaattatattagtgatattgaaagttgtttggttgatgttttgcctgaaagaatagaaaataagatgatgaaactttttttatatttaaatgaaatttatggaattgatttttctgatgatttttatttaaagaaggccttgggtgtgcatattttagcaatggaaaatcgaatgagatttgatacttatcttaaaaatccaatgttgaagatgattaaaaagaattatttattagcttatttgataagtgttgatatctggttatttttacatcctgaattaaatgttatttatagtgaagatgagattgcttattttactattcatattcagtattcattgatgagaaatcatcttaaaaacaaaaaaagagtcttattaattaataatcttaattcttcatcaacagaattattaagttatgagttattacaagaatttgatgagtttatggaaattgtcgatagtattcatattagacaattagaagatattcatatggaaaaatatgatttagtcatctcgacatcagcaatttcacaagcaacaattccattcattcaaatatcacctatattagatcaaacatcaattcataagataagaaattattttatgcagatagaacattattcattaggggatttcataaaacctaaaaatatattattaaatagttcaatggaatctaaaacagaagtattacaatatatttctaaagtatttcagctttcatttagtgaattagatcttaaagagaatgttggaaatatggcgatggaagggcatattgcgataccacaaatgataggatatagtgatattgttgaagaaatgttaataacatttaataagccaattatctgggatcatgaatttattcaatgtgttttatttgtttctttacctaagagattctttttaaggtatcaaggatattattctttattacaaaagttagttatggatcaagaagccattgaaaagatattgagttttcaaaagactaaagaagttgaagaatttctaagtggatatcattaggcatcctttataggatgccttttgtgcactaacttccactttgaagtgaacaattacgctattcatctttctttagttattttgtaagataaaagtgtcaaaagaaggagaaaagaaaggatgataatatgaaaaaatttatggattttattgaacttaaattagcgccacctttagaaaaattaggtgaagaaagacatttaagtgcaattaaagatggaatgattagtgttattccattaaccatcattggaagtttctttgtacttatacctaactttccaattgatgcttggataaagtttatcgaaccttatgccccttggtttaatgctgtttcagcaattacaatagatattgtaggtttagttgcagcaggatcagtagcatatttctttgcaaaaacttatcgagatacaaatcttaattcattaacatgtagtgtcatttcaatgacagccttccttcttgctacattgagtaatgaatggacaattgatacctcgttatttggaacaaaaggactatttacagcggttgttattgcgttactatcaacaacaattttacatttcttttataaacgtaatttagtcattcatttccctgattcagttccaccccttgtttctgaatcatttatgtcattagtcccagcgttagcagtacttcttattgtttgggtattacgtgttatacttgggtttaatattaattctacattaatgaaaatttttgaacctgctgtctttgcgttaaatacattaccaggattcttaatctttatgttgcttcgttctttattgtggtgtgtaggtattcatggtggtgctgtcttggccattgctgatccaatattcttagttatgttaggtgataatattgccgctgctgcagctggaacaccacttccttatattaccgcttctggatttatgtattttgttttcctaggtggcggtggagcaactttaccacttgtatttttaatgatgcgttctaaagaaaaaggatttagatcacttggaaaactttgcttagcgccagggatttttgaaatcaatgaaccagttgtctttggggttccattggttatgaatccacttatgatgattccttatgttttagcaactgaggttttatcacttgtaacttatggactcatgtatttcaatattattgctagaccacttgtcaacataccgtggacaatgccaccagtacttgcacagtatttcttaactggtggagattggcgtgcagccatttggggtgttatttctttatttgtagcaggtgctatctattatccattctttaagattatggaaaaacagagattagaattagaagcaggaaaggaaaaataaaatatgaaaaaagaattaaaagttgttattattggagcgggaagttcatatactcctgagttgattgaagggttgagtgaacatagaaatgtcttaccggtcaaagaaattgttttagtagatattaatgaagaaagattagagattatggatggttttgttcatcgttattgtcgtcatttggattatgatgttgaaatttcttcgacaacatctcgtcaagaggcctttgttggagctgatttcattgcttgtcaaatcagagttggtggaaataaacaacgtatttatgatgaaaaaattcctttaaaatatggtgttattggacaagaaacaacaggtgtaggtgggatgtttaatgccttacgtacaattccagttatgattgaaattgctaaagatgttgaaaaatattgtccagatgcttggattgtcaattattcaaatccaactggtttagtgactgaagcagttttaaaagtttgtcatgtaaaaatggctggtttgtgtgctgggggaatgcgtcctcgttggtggtgtgaagaagctttagaagtcagcgaagaaagtgtttattatgattatattggtttgaatcatatgaattttacttataatatcacaattgatggtaaacctatcactgatgaacaatttagtaaagtcgctaaaaaatgtgcaactgtttcacaagatcttatccataaactccgacttattccaagtcaatatacacaatattattttcatacatcaaaaatattatctcagcttaagagtcaggataaaacacgaggtgaagctattttagaattagaaaaacaaatttggcgtgaatattcaaatccagaaaatgatgataaaccaaaaacacttgctaaacgtggtggtggcggatattcacgaattgcagtaggtgtgatggaagctgtttataatgatacgggaaaatggatggtcattaatgttcctaacaatgggacaattcaattcctggatgatgaggcagtcattgaaacagcctgctttgtgagccgtgatggaataaaaccattgaatttaaagaattatccaacagaagttattggtttgatttccgctgttaaaaattatgaatcattgacagttgaagccgccttaacaggtgactatgatacagcattaaaagcaatgctagcacatccattaattcgagaatatgatattgctaaaccattattagatgaaatgttagaagcgcataaagattatttaccacaattctttaaaaaatgagccaaaatataatgaaacagtatatcagagaacaggctgatatactgtctcatattttagaacatagtgattttgatgttttatcatcaataaagaataaacatcagataactattgcagcttcaggaacatctaaaaatgcagctttagtggtaaaagctgctttagcaaaagcaaatattcaaatgaatgtagaaaccccttttcaattacaacattgttcacgtttgttagagacttcagatttagtcatagcgatttctcatacaggtaaaagtaaaggaactttagactgtgctaaaatcgcccatgatcatggtatcacaacaattggtataactggctatatggattcaccattaacacaaacatgtgattataatattgatattggttgtggtgatgaaccaattggacctaagacaaaaggttacatggcaacatgtttaacattatttcttgtcttatttcaattactaaaaaacaatcatgattttacatatcaaaaaaaagattttatgaaagaatggttacaagaaataaaacttttcaatcaaacaattgaggaaacagaaaattttttaatgaatcatcaagaatgggcaaaagcttcttgtgtatcagttattggttatggaatccaatttggtgtagcttgtgaaggaaatttaaaattattagaaaccatgcaaataccagcaatgtgttatgagttagaagaatttatgcatggtgcacatcgaacaattacggaagatagttatcttatttttcttcatgtcaatggtgaaggttatgatttaatgagtcaattgatcgactttgctcatcaacaaaatgctcacctcattgttatagaagataatcaaaaagtaaaagctgatttatatgttccctatttatcaaaaacaaaagcagtttttacaacaagtcttattttgcaagttatggcatcatatctccctgaatgtaaaggaatcaatccttcagatccgctctttaaagattttgcaacaaccgttggaacaagagttatataaatctcgacaaaactgtgtataaaacaaaagcaatctgcaaaatatataaatatatgcgtagtgtataagtatgaaattcatacgaaatcaggtatgagtattgttaaaaataataaagctagctacaatacgtgtataacaaaaaacgaaaagagggaacatatgaaaaaattattagtcgcttttatttgtggagcttttgtttttatgacaacattagcaccaaccaaagcattagatgaaagtattaatgcccaagaacaaagattattagattatgttgaaaagggtatagaagtagatggacaagttataagttggaaagttggtagtgaagaatacaacaatttaaaaaccatcttatcaagtcaacaagttaatttaagtgaagaaaatgtcaacacaatcaaagattcagctaaaaatattttagcttatgccaaatcactaccagccgatactcaaatgacacatgctgttttaactcatgttttatcacttgcttcaccagctttagatatctttggattaaaagcatactataatgctgctaaagatattttaacaattatgagtgctgatggtgatgaaatctataaattagaaaatgttttaaaagaagcaactcaaatcaaagatcaaatgacaaaacctacacaaggaacaaaacttgaacgtactggtgaaaatttcacaagtacatatacaattattggtagtttaatggttgtgcttgttggtgctggattatttgttttaaagaagaaagaatttattgaatgctaaaagcaaaaataaagaacataatggtaagcctattgcttccattatgttttcttgttgtggggtatgggattttaggagcattagcatttccttatataagaccacttcattcaatatatgctatgatatcgcaaaatcaaactccagatttttcaaaagaagccagacagctttataatcaggaaaaacaattacctacaagtggaacgatagacgcatcaacattaaccaaaatgaaaataaccgatcaatatggaaacattgatattgattcagtacaaatccatgttcctttaatctatggtgcaacaacaaagtgtttacatatgggagcaggacaaaggattcaatcacaaatgccaggttttgataaacctgttatgattggaggacataccattccttatttcaaagatttaattaagatggaaaaaggggatactataaaaataacaacatattatgggatttttgaatataaaatgacaggttcaaagatagcaaaggcaactgatacacaggcttatgatttattgcagaataaagaacaattgattttatttacttgttatccagtggaaggattaggtgagaaagaagatcgtttctttgtttatgctgataagataagtggaccaacagtggtaggtgaaatcaaatgaaaaaaacaaatcatttactagcaagtctttttagtttctttattgctttctttatgtttttaggattatttgtgacaatcacaaaattaactttaatgaatgaaaattatcttttcaaaacactagagaaagttgattattatcaggctattgccaatgagctcaatgaagattttatgcaatcagcgggggctgcaggatttgaaccagatatctataagaattttgtcagtagcaaagaagttaaaaaaatgtctcaagattatattcaaaatttctatactcataaacaagcatctatccatactgatgcttttgaaaaacgattatatgaatatttacatgattatgctaaaaaacaaaatctacaattaactcaacaagatgaagaaagattaaatcagtatattcaaataaatgttaaaggttatcaacaatatctttcatttccttttatgcaatatttgataatggcttttgatatgcttgatcaagtcattccttttattttaatagcgtgtttaataattgtattatttgcgattgtgtttttatatttattaaagttaaaagggaagtggaaagcgatttatataagtagtatttgtattggtagtgcatttatgataactggaatacctttgtttattttattaggtcaatatattgaacacattcatttatctcccgaagcttattatttgtttattgtgcaatatttaaaaggttatttaaatagcttgttgttgtgtggtggattgttgtttattattgggattcttgttgtattattccaaaaaaagggaagaataactaactaaagttcattcttcctttctttatgtatgagaattttatctaaagtagaaaagtcctataaaaatttgtagaagtatgctataatacaaacgttagattagaagtcgggagaaaaatatgattggttattataattatacggttatattgacgtatttaagtctgattagtgccttatttgggacacatttggcttttagaggagaacctgttggcgctttaatttgccttcttttatgtggggcatttgattcctttgatggaatggttgctcgtacaaaaaaaggtagaacagaagaagaaaagaaatttggaatccaaattgattcccttgtagatatgtttagttttgggatttttccagctattattggatatacaatgggacttaatggatggctatggttcgctatttttgccttatatgcaatttgtgctgtaagtcgacttggatattttaatgttgccgaagaaatgagacaaaaagaaacaactgaaaaaagaaaatattatcaaggattaccagtaacaagttcttctttgatctttcctgcggtttatttattaaaagcagctgtcggacttggaacaatgcaaggaatttatggaattatgatgttagtggttgctcttgcttttgtaattgattttaaagtgattaaacctggattaaagggtattttagcaatgggtgttgttggtgtatttatttttataggattgatattattgtaatgaaaatctatgatcgtcaaggtcaagaaattattgttgaccaaagtcaaaacaatttattaaaattgctatatagtcatgtattaggaagatgcgcactgaaagtgttaacccttccttttattactcatattggtggtatgtatatgaatagttctttatctaagcataagattgcttcatttattgaacataatcatatagatatgagtcaatatgttaaacaagactatcatagttataacgatttttttacgagaaaaattataccagaaaaaagacctattgaaatgcaggaagatcaattgattgctcctgctgattctaaattaacatattatcctattagagaagatactcatttattgattaaagattctctttattcgttatccgatttattacaagatgaaacattagcaaaagaatatcatggtggagattgtctaattttccgtttaacagttgatgattatcatcgttattgttttattgatgatggtgatttagaaggagaacactatattccaggtaagtttcatactgttaatccaattgccaatgattattatcctatatataaacaaaatgctcgttcttattcattattacatactaaaaattttgatgatgtgatttatatggaagttggagcaatgatggttggtaagattgtcaatcatccaataaaaagctttaaaaaaggtgaagaaaaaggttattttgaatttggtggttcaacaattgttgtgttatttaaaaaaggcattgttcaacttgaccaagatattattgaaaattctaagactcatcatgaaacaagagttctgatgggtgaaaaaataggtgtcaaacaaaagagtatgtgttaaaatagcaacgcaggaaatatgaggaggaaagtaagatgtcaaaagttatagcagttacaaatcaaaagggtggtgtaggaaagacaacaacaagtgtcaatttaagtgctgcactcgcatatatgggaaaaaaagtgctattaattgatattgatcctcaagcaaatgccactcaaggtattggtgttgatcgttcagaattagacttaactgtttatgacgctattactcaaaatacgccacttaaagatattattattcctactgatgtagaaggattatcaattgttccagcaaatattgatttagctggagttgaaattgaactttctcaagtgaaatcaggaagggaacaaagattaaaaaatgctttgattgctgaaaaggataaatatgattttgtgattattgattgtccaccagcattagggttattaaatacaaatgctttaacagcttcagatgctgttttaataccagttcaatgtgaatattatgccttagagggattgactcaattactaaatacaatcttattaacacaaaaagtctttaatgaagatttaacaattgaaggtgttttattaacaatgttagattctcgtacaaatttaggaattgaagtttcacaagaagttagaaaatactttagagaaaaggtatatgatgttgtgattccaagaaatattaaattatcagaagcaccttctgaaggattgaatatttttgattatgataagacatctgaaggtgcaaaagcatatgcgaaattagctaaggaagtggtgagacgaaatggcaactagtaagaaaagtaaaaaattaggaaaaggattagatgctatctttggtgatgcttctcaaggtggagatttacaatcagttattaatgcaattgagaaaaaagcaccatcacttaatcatgttgaagtgccattaaaagatattcgtcctaacccttatcaaccaagaaaacattttgatgaagaaaagttgaatgaattagcacaatctataaaagaacatggaatttttcaaccaattatcttaaaagaatctgttcaaggttatgagattgtagctggagaaagacgttatcgtgctgcttcaattgttggtttagagaatgttccagcgattattgttgattttactgatcagcaaatgatggaaattgctttattagagaatattcaaagagaagatttaaatgcgattgaagaagctcaagcttatgcaacaatgatgaaaaagcttaatttaacacaagaggaacttgcaaagcgtgtgggaaaatctagagcacatattgcgaatacggtaagacttttgaaaatgcctaagaagcttcaaaattatgttttagatggtgaattaacaatgggacatattaaaccattgattacaatagatgaagataaagctttagaagttgctcaaaaagcaattgctcaacaattatcagtaagagaagttgaagatattgttaagggaattaaactacaggcagcaagaaaagctaaacctaaagaagtaaaacctaaggaatatgtttatgttgaaggtttattaagaaaaaaatatcgtacaaagattaaagttgatgataatgctattacgattaaatatagtgatacaaaagatttaaacagaatcctagaattaatgggtgttattgaggaagaactctagagttcttctttttgctaaggaggaatttatgaaaaaatcaacaaatttattagaaggacctatttttcaaaccttgatgaaattggctttaccaattatggggacttctttaatacaaatggcttataatttaatagatatgatttggataggaaaattaggagcaagtgcagtggcagcagtgggaagtgctggtatgtatatgtggctatctaatggcattagtgcactagcgagaatgggtggacaagtttgtgttggacaatcacttggttctcatcaaaagcaagaagctacgaattatgctggggcaactattcagctaggaattttatttgggattatttttggtttggtgacatttttattttatcagccaatgattggtttttttcatttgacttctaaggaagttattcgtcaggctgaaatttatttgattgtgacatgtggatttgtagtgattaactttttaaatcagatatatacaagtttaatgaccgcgattggaaatagtcatcatccctttattgccacaacaattggtttgattttaaatattttcttagatccgctctttatttttgtttttgatatgggcgtcttaggggctgctgtagcaactgttatttcacaaatcatagttttacttatgatgatttattatgctaaaaaagatactttgttatttgatgaagtaaaattaaaaaagaaatatacaaaacctgttttttcaagaatattaaagattggtttaccaacgggtttacaaagtctatgttttacctttatttcaatggttatagcaagatttattgcaggttatggtgatgtagctattgcggtacaaaaagtaggttcacaaattgaatctatttcttggatgagtgcagatggttttgggagtgcattaaatgcttttgttgcacaaaactatggagcgaacaatattgaacgtgtgaaaaagggaacatattcagctttaaagacatgtgttctttggggaatctttacaacttgtgtattgtatttctttccgcaatttattttccaaatatttattagtgaaaaggatgttattcctttaggggtagattatttacagattcttgctttatcacaattatttatgtgtattgaaagtacgcttgctggaactttaaatggtctaggaaaaacctttattccatcgtttatttctgtaacattaacagctgcaagaattccattggtaatgattttatcagcaacggcattaggtttaaatggaatttggtggtctatttctttatcaagtattttaaaaggtgtagtgattacgatttgttttatatttgttataaaaaagcttacaaaaaaacctatagaataactataggtttttatagtcccatttctttttttaacttttctaattcctcatcaacacttgcatctttaccagcatatttagcttctaaatcttcaataggatcttcttcatcactatttaattcagccattgaatttgcttcatcaagcatacgatcagctttttcttccattctttcaaaagctttcatagaatcactggcactatccattgaaccagtcactttattgatcttttcttgagtttttgctacagcgaccttagctttaatattttttctacgttgttctaatgattgaatatcttttgttaatttatcatgcatttcacgcatttttgtcgcattgtcatgagcaatactataagctttttgtaaatctataccattatcaacatagctttgtttctttgttaaaaaagcttttgcatcatcttcatttcccgcttttaatgcttttcttgcaagattatcatacttagcaatttgttcatcattttcttctaccaaacgtttagctcttttttcttcagccataactccagcagtttcactcttaacttcagctaattgttcagttacttgacgcatatactcatcaatcatctttgctggatcttcgcatttgtctaataatgcattaatattagcagacataatgtctttaaatcttgaaatcattcccattttattttctcctttcgatttcaattgttacatatcatcctcatattttttctctaaatcggttgtatcttcaccaaaagtttctaaaggcttatctaatatttcctttgtataatcttctttctctttttctctttgagctttctttttaaatattaaataagcaatgataccaatacctacaacaccaccaacaataattgctattttagcaaaatcccaaccatttgttggagcactcatgatattttcaccagttgcactaaaggtttcagaaatcattttttcaattgataaagatgtattatagtagttcttttgaaaatatccccaaagaatatcaatagcttcactatccataatactatcagccgcatatccacttaaatacctaaattcaccatccatctcttgacttgaatcattcaaacaagcaaaataagcaaaaataaaatgcccttcatctttaaatcgttccttataaactttttctaaatatgcatctgcttgagttgaaagaaaagtagaaccgttccaatattgctgcgaataaggaatcatcataacataaggttgaataccagtttcctgataaaaatcttctaaaccactgattaaaacactaggacttcttatccagcttaattgatcatcataccaatctgttttcttaacaaccccactcaaagcttctctttgtttcgtatttttaggaacatcttgatgcttacttgaagttgaaaagaatagcatgcctataataacacagataaagacaattgatatgataacactacttatactatggcttccataatttcttggacgaggtcctcttggtggtcggggacttcgataatatcgagggccaccaacaaaaacagttctaggtccactcgagcgtcgtgtataacttgaatgacttgaaccactaccgcgggaaaatcccccagaagaacgaccacctccgctaaaaccaccagaggaatgtccgccaccaaatccaccactgctgtggctaccaccaccgctacttctacccatgacatcacctccgtattaactaaaactattatatcaaatttatgataagaatattataaaaatgtgtataaaaagaaagaaatcatagaattatcttttgaatggaaaagtggaaatgccaatagcacttccactaacctttatattgagttaagtctttatgagttcttaaatataatttacttctttcataatcacgaggatatttatgataagcttcttcaatttgacgaggatcattaacagggatttgaagttgatggaataagttaataatttgaataaaatcatctttatttttagctttgaataaatatgttccttcttcacttacaaaatcaaccttaggatagaaaatatattgactaaataaaccaaaattaacaaactgtgcagttaaatcaagattaatttgagaaatagtcgataaatcaaaaccaacaggatcattatattgattaataaaagagacttttgttccatcgatatgaaataaagtattattcttagcaatatctttatcatatggttgaccatcaataatcatataaacacttacacgttttgaagatggttgaataggttgtggttcaactggtgtttcttggataacttctgtttcacttttttttgtagataattcttttaataagctatcttgcatagtgattgcattaatctttttatagaaatccaattgactatcttgttttttgtaaactacagattgaatacctccatcatataaatacatcattttctttgcataacttgcaatcatagcatcatgtgtaacaagcaaaattgttgttccttgttgatttaatttggataagatatttaaaactttatgagagtttttagaatcaagattaccagttggttcatcacagaatagaatctttgggtcattgattaaagcacgagcgattgcagctctttgacattctcccccagaacattcatgtgggaatttattcaataaatcagtaatttctaaatcattagctaattgtttgattctttcttctaatttcttagaatcttctttggctaatatagcaggtgttgcaatattatcaaataaagaaagataaggaataagattatgattttgaaaaacaaaaccaagatattgatatctaaattcacagagttgatcttttgacattgcagagacatcattttccatgaaacgtaattccccagaactaatacgatcaagtgttgataaacaattaagcaaggtactctttcctgaacctgatggacccattatacatgtgaaatcagcttcttctagtgtaaaagtgacattatttaaagcatagaaatttttacctctttttaaatataaatcaggatcataaaccttattaatattattcgcctctattaagatatttgacattgttgataaccttcctttgcattattttttcttgaataaacatataaacgacaatcaatgtataaagtgcaatataaacaatcattacaaatacaatagcactttgagatataactccattttgtgaaactaaataaagaatttctaaaataaaagccaatggaattaaaataccaagaataaagaagataagattctttaaaaagacaatattatttaatttcttagaatcatatccaacagcatgaattgttgcaattgatgtctgttgttcttttaaataaagagtaaaacgtaaaataaaacataaaacaatcataatcattatcataataaaacaaggaacagtgactgtctcaataacaaatgaggatggaacattcaacaataacataaagattgttggaataatgcaagctactaataatattaatgaggacatcactttagtaaaatcctggaataatgctaaagcatttaaacaaataggatgttttaataattgatgatgaaataaatcatataacaatggaatcgttttggtaataattaagattaatccgattaaagcaaaactataatagaataataaaattgtgattgaattattttgatttaagatttctttcattgaataaaaagtaaagacaaggataaataatgaaagaacaattgatagaaatggtttctttgcttgattatcgattgaaaagaaactattcttttgagatgtttttaaatcaagctgatgtgatgagagatatttagctagattgagatcgagtgagataaactggcttgaaccaatggctaagataagcacataagttatgattaaaaaacaaaaataatagaaaatcgtttgagtaaatgaatattgtaaaataagatgtgactgataataatgaatcagatgcataatttccatcccaccaaagactccaataatggctgataaaagaatgatgaaaccaaattgaatagataaataataaaataagtctttagtctttgtaccagctaacagtaagatagaaaactcctgctttttattctccataaaatacttagtaataaaaacattaagcaacagagcaatagctgcacctatgacaggaattaaatgaattgtactacgaatctcccaagaaaaatccaatcgaacaaatgcatcataaatcgctagaaaactaaattcaaaacttgatagaattatgaaaattcccaacaataagaaatatgttttcttttgattcttaaagactctttgaataaatgataacatatctaaaactcccttctatacattaataatagcacgtaataaaaataattcaaataatattaatgaattaataaaaaattattatgaaaatagtttttttcttgattctatgtagttttaaaaactacatttttatattgacattataatacatatttggtaacgtatacataagaggtaaagtaaggcgaggagaaagagtatgaaaattattacagatacaggatcattgtattcaccagaagcaggggagaagattggcgtagaagttttgcctttaaatgtcatcattgacaaaaagagttacaaggaatttgttgacattcaaagtgatgagtttattgaattagtgaaacaaggacatgttcctagttcatcacaaccttctattggtatgacaatggaattatttgaaaaatatcctgaagaagaaattttagttattaatatggctgatggattatcaggaacatatcaaagtacattaggggcaaaggaaagcatggaacataatgaaaatattcatgtgattaattctatgacattatgtggtccacaaaaatatttagtagaaaaagcagttgagttaaaagaaaaaggtttttcattagatcatattatgaaagaattacataaaagtattgcaaccgaaaaatcattcttgattcctcaagattttggtttcttaaaacgtggtggtcgtttaactccattagcagcaacagttggtggcatgttaaagattaccccaattatgacaatgaccaaagatcataagcgtttagaaaaatttgctatgaaaaaaacattaaagagtgctattaaagaggttattaaggcatttgaagaattaggtgtgaatgaagattataagatttatgtgactcatgcaggagttttggaacaagcaaaatctgtcgtggcacaagttcaagcagcatttgaaaatgttgttattgagttatatgatttatctccagcatttattactcaaggtggtcctggctgtatagctattcaaacaattaaaatgtaaaaaacagaggttgatttaagaatcaatctctgtttttggtaattgttgattttttaaagaatgggggatgagcttttgatatgttttttcaatccattctttggtaaagccattttgataatgataatgtgatttttctagttcatttgtatattgattgaaaggaacaagtttaaagtttttgaggtgttgatcataataattaatgattggtatataatcgatgttttcaatcgatattttttcttcttgttttttaatatcaagtgtaaccatcattgaaacattataagcattcttaaattcttgatttgttcgatcaacaatcggatcagcagctacaaaattacctaaagaatacatacataatgtcctattatcatttatccattccattgtttgtgaacaatgaggatgattcccaataataatatcaacacctaaatcactgataaactgagaaactttcttttgtttagcatctaactgatatgtaaattctgtaccccaatgcatcatagcaatcaaaacatcacaattttttcttgtttcactaatttctttctttaatagttgttgatattctttagtgaattgacgaccattaggatcattaaacaaaccaaccttttcacgactctttaaacttacaacttgattagtcgcataagtataagcaacaaatccaaatttaataccattaatcgttttatactttccttgattacgatctttttgattataataagttcctactgccataattcctttatcttttaagaaatctaaagtattattgattcccttatttccacgatcattagcatgattattagctgttgaaacaacttctaaatctaaagaagccacttgattaccaatctctttagaagcattaaaagaataaccaacaccagatgtctttaattctttaccaccaataggtgtttctaaattagcaattgataaatcatctttttgaaaataatgtttaatcaaatcataatatcctttatcatgggaatcatcttctatccaatcataataaggctgctcatataataaatcacctacaaaagtacattgaaccatttcttcctttggcttttgtggtttttcttcttgactttgacatccacttaaaaataataaagcacaaagacataattgtatttttttcatttttatcacctattctattgtaggggataataagagttttggcaatctttttaaaaaatgaaaatgactttcaacttatgaaaatatgattcaaattcttcaattattctttataataaaaaagaaaataaaggaggaataataatatgagttttcgtagtgatttttattggggaggagctacagctgctaaccaattagaaggtggatggcaagaaggtggcaaaggagtttcttgtcctgatgtatgtactggtggtagtgcaacaaaaagtaaaagaattacccctgttttagaagaaggaactttctatcctagtcatgatgcaattgatcattatcatagatataaagaagatattgcattatttgcggaaatgggatttaagatgtatcgtttttctattgcatggacaagaatttttcctcaaggtgatgagagtgaaccaaatgaagctggtttaaaattctatgaagatttaattgatgaatgtttaaaatacaatattgaaccattaatcactatttctcactatgaagttccatttcatttaactcaaaaatggaattcatggacagaccgtagaatgattgattgtttcttaaatttctgtagagcaatctttacacgttataaaggaaaagtgaaatattggttaacttttaatgaaattaactcagcaacaacagctatgggagcattcttaggacaaggaatcttaaatgaaattaaaacaatggatttcatggatcaagttgatgtaccaaacaatcgtttccaagggttacatcatcaattcttagctagtgctttagctgttaagatggctcatgaaattgatcctaactatcaagtcggatgtatgcaaattatggcaacaagctatggtttaacatgtcatccagctgatcaagtgaaaaatcaacaacaaaatcatttaagaaactggttctgtagtgatgttcaatgtcgtggaaaatatcctaactatatcaaaagatattttaaagaaaataatattacagttaaaatggaacctggagatgatgaaattttagcagctggtcctgttgatttctatacttgttcatattatatgtcagcttgtcaaactgctgatcctgctaaacaaaaagctggtcaagggaatattttaggtggagttcctaatccttatttaaaagcaagtgattggggatggcaaattgatcctgaaggattacgttattcattaaatgaaatttgggatcgttatcaattacctatctttgttgtggaaaatggattaggtgcttatgataagattgatgaagatggtaagattagagatgactatcgtgttgattatttaagacaacatatagagcaaatgcatgaagctgttttagatggtgttgatttaagaggatatactccttggggatgtattgatttagtttcggcatctactggtgaaatggctaaacgttatggtttcatttttgttgaaagatatgatgatggaactggagatttctctagaagaagaaaagaatctttctattggtataagaaagttattgaaacaaatggagaagatttaggataataactgggtgaataacccagttttttcaaggagaggtattacgatgatagaaaaagcaaaattaaatgatttagaagaagtttatgaattgatttgtattctagaacaaaaacaattgaataaagctcattttgataaagtttttcaagagggaatacaaaataaagatgttgaatatttagtttatcgtaaagatgaaaaaattctaggttttctaagtttttcaattcatcattatttacatcatgatgatgatactggagaaatcgttgagttagttgttatgccagaacatcgtggtttacggattggtgaaaaattattacaagcaatagaagatattgctcgtgaaagaaaactagaacaaatcgaactttcaacttcaacatatagaaaaaaagcccatcacttctatgaagtccatgggtatatcaaagatcattataattatacaaagaatattaaatagcttgattatgaatttggtcaccatctccatctaaagagattgtagtttggctttggctagattgatgtgtgacaaaacaattcaaaacatccttacatcttgcgataatttcgcgtgcttcacgaagtggttgtcctggataatgacttaaattagcgggaactccagaagcttctaagcctaaagattgagctatatataaagcacgataaaggtgatagtcttgagtgacgataatcaccttttttgcttgaaaaatatccctagcacgaataagactatcatatgtagaaaagcctgaatggtctaaaaagatatctgaagaagggaccccacttttaattgcataagatttcataaccgcaacttcattatattcatcactactatgatcaccactcataataattttgggagcttttttgtttttatatagtgttacagcttctttaatacggtctcttagcataggagtaggtttattgtttcttacgccagcccctaaaacaagaatacaatcagcatcttgcatatcttgattaacctgttttttggttgattgataaacaaagagatttaagctggtaatgataattcctaaacatattactaagagtgataagataagaaacagtttttttaattttttcacttggatcacctctattctattatagagaatatatcctataaatatcttaagaaatcattaattatgagtaaacaaaaaaggaattttcattccttattgtttgatataatcaataacctgatctaatgaatcaagaatttttgtggtcatctttacatattgttcttcaggatacttcatatcaggaatacaaatcactggaatatgtgctctatatgatgcttcaattccggcttcactatcttctaaaaccaaagcatcctgtacttcaactcctaatttttcacaagcctttaaaaagacttcaggatgaggttttccttgcgtcacttcatctccacaaatagaatcatcaaaatatttcatcacatcagctaaacctaaaagatgttcaactcgatttcttgtactagaagttgctactatggttttatattgatgctcttttaaataagttaataattcaattaaaccttttttgattggtacaccatctttatcaaaaatattattcattaattgatgaacatcatttaaaacacgatccattggaaaatcttgaccatattcatcaaacattaattgataggccgtaggcaaagtctttcctaataaagttttataaaaatcttcagacatagttaatcccatttcttttaaaactgatacataacactcataagtgactctttcactattaatcattaacccatccatatcaaaaataactgctttcatcattatccacccctttatcagtaagtataagaaaaccagcgaaaagtgtcaattaaaaaaacaaagaatataccaatattattttgcttattttatgagtttatattataatggtaaaggtttggaggttagagaatatgaataatatgatagaaagattagaaacgattgcaagaagatatgaagaattaaatgaaatcctaatggatccaagtattgctagtgatattaataagatgacagaagcatcaaaagaacaagcttctttagaaactgcttataatttatatcaagaatataaaaaagttatcagtggaattgaagaagcaaaagaattattaaaagaagatgatcctgaaattagagaaatggctgaattagaattaagtgaattagaagataaaaaacctcaattagaagaaaaacttcacttagaattgattcctaaagatccaaatgataataagaacgttattgtagaagtaagaggtgctgctggtggagatgaaggtaatatctttgctggagatttatatagaatgtatgtgaaatatgcagaatcacaaggatggaagattgaaattatggaagctcaagaatctgatgcaggaggttattctttaatttcatttatggttaaaggtgaaggggtttattcaaagttaaaatttgaatcaggatcacaccgtgttcaacgtgttcctaagacagaaacacaaggacgtgttcatacttcaacagcaacagtgcttgttatgcctgaagctgaagaagtggattttgaattaaatccaggtgatttaagaatcgatacatatcgtgcttctggagctggtggacaacatatcaataaaactgactcagcagtacgtattactcacattccaacaggaacagtaacaacatctcaagatggacgtagtcaacatgacaataaagataaagcaatgcgtgcaatgcgtacaaaattgtatgaaatgaaattacgtgaacaagaagaagctattggtagtgaaagacgtaataagattggtagtggagatagaagtgaaaaaattagaacttataactatccacaaaatcgtgttactgatcaccgtattggtttaacaattcaacaattagatcgtattatggaaggtaaattagaagaaattattgaagcattaattaatgaagatcaaagattaaagcttgctggagaagaagaataatgacagttagagaactcattcgtcaaagtgaagcaatgcttgatgaaacgaataaagattgtaatgttgctaaggtgttattttatcatttggcaaataaagaacctcatcagctttatttaatgatggatgaggaagtggatgagaagttatatgatgctttccaagcagggatgaagcgttatatggctggggagccaattcaatatattaaaggaaaagaaactttcttttctagagattttattgtgaatgaaaatgttttgattccacgttatgaaacagaagaattagttgaaaatattttatataagatagatgattattttgatgattatgattctattgatttatgtgatgtaggaactgggtctggagcaattgctatttcattagctttagaggaacctaaattaaaggttacagcaactgatattagtgaagaagctttagaagttgcaagattaaatgctagagaattatcagctcaagttgacttctatcaaggggatatgttaaaacctttgatagaaagaaatatcaaggtagacatttttgtatccaatcctccatatattcctaatgaacaagaaattgaaaatgttgtgaaggataatgaaccacatgttgctttatttggtggaaatgatggtctatatttctatcgtaagattttctctcaagttcatgaagtcattaaagagcgtgctttgttagcttttgaaatgggatttgatcaaagagaattaatgagtgaagctgttgaacattattttccaaatgttccttatgaaatcattaaggatatcaatggaaaagatcgcatgttgtttatttactataatttaaaataaaggatagaacatgatattagaaacacaaagattatatttaagacagttacaagaatctgatgcaaaacgtatgagtgaatatcgatgcaaagaagaagttgcaaagtatcaatcatggaagaagtatactattgaagatgcagcaaaacggattcagcattgtttaacaataacaagttttaataaaccaaaatcagattatcatttggctattattttaaaagaaaatgatgaaatgattggtgatttatttgttgaagttgttaatcataaggtttttgttttaggatatacgcttgattcattatattggtcacttggttatgcgacagagattgtatcggcttttttagagtatatgaaagaaacatataagtttaaaaaggcaatctgttatgtttatcatgataatattcgttctaaaaaattattaaagaaattacattttgttaagtttgatgaatcatattattatgatgatgaaggatatgtaaaaaagatatagaggttacatcagtagatgtaatctttttttggctatttaaaaaattattttttacctttaggactatgctataataaaaataagggatggtgatagaagtgaaattagaacatattgataaaatatatcataatcaacaaggggatgttcatgctttgcatgatatttgcttagaaataaaaggaaaagggataacttttattattggagcaagtggaagtgggaaaacaacattactacgcattttatctttagaagataaagattatcaggggataatagagttagatggaacagtagagacaattcaacaagagattgtcttatttgaagcaatgagtgttttagataatcttaagttagttagtgatgatttgtcacaaattaaagcttggttagaacaatttgaaatgttagagtttatgcatcaaaaggtaaaaaaactctctattggacaaaagaaacgtatacaaattattcgttctttgttagttaatagtgattatttactatgtgatgagccaacagcagctttagatcatgaaaatgctcaattgattatggaaacattgaataatgttgctagggataaagttgttattattgtgacacatgaaatagcattggttgatcaatatgctgatcgtattattgaaattgaacggggaaagattatcaaggatgaacaagttcatgcaaaatctattcatcaacctttagctattgaaaataagaaaaaaacattgttaaaacaaatattatttattttccaatatatcaaagcaagaccaatggagtttttatttaaaaccatgattgcttttgttgttttattaacggcttttgtttcaacttctcttttgtcagcaacaaatcaagtggtcgttgaaagaaatcgatggttacatggagaaaatattattgtaacgcaacctaagaataaaaatttaaaaaatgaagaaggaaattatacaaattatgatgtctatgataaaaagacaattcagcttattgaaaccgatgttaaagaagtcattggttatcgttatggttgggatgctacacaatatgcattaactggttcttttagcaaagagttaacaattaaagaattaaaagaagtcgttaaagaagatgaacgagtttatcaagaaaccgggaaaatacctcatagccaatataataaattaaaaaaattattgaaagaactggaagaaagtggggctgaacaacatctaccacaagattttaaaattactgttgattttagaaattatgatggatttaaagatcattctttttctaatgcaccttcaaaagaaaagcatagaataggtgaaaaaaatagtatagaagtcattccctatcaattatttgatcattatcaaatctctttaaagttagggaataattctattaaagataatgatgttattatatcttcatcactagcagagcttttagcaaaagaatatgaaataagtgaaaaagacctgattggtaaagaaattccatttaattatgctttagaaaaagaaatgcaggtgacggttgtaggtattacttatgaagaaaatgaaaatgaaaatcaattatattttaaagcaggaagtttagatcaatggattgagtcagtctatgaaatgaacccagattatttaaaatatgtctttgtttattttttaaccgatcctcaatatgatgctaaaacaatcacacaaaagataaatcagacaattgaaggtaaggaaagtgtttttgctccattttccgaatcttatttaacaagtgaggctgaatatcaaaatcctatctatttttatgcatttataattcttttaggagtgggattaattattattgagatcattgtcaatatattaaaacaaaaacgtatgaataaagaagaaaaactattagctcattatggatattcatcagaaatattattaattggattattagttgtttcatttatattagcaggtatcatacaaactcttttattaccttatttgtgtgaagttttaaatcagcttgctcatacttttggttttgcatcatttgttacgtataatcttaaagaatatagtattgcatttatgatttcacttattttatttattttgattgaggggattatgtatggaattagaacttataaacgtagataaggcattttcaggacatgttgtttttaagaacttaaattttgatttttcaaagtgtggattatatgttatcagtggaaagagtggctgtggtaaatcaacattattaaatatattagcaggatatgaaaatatagatgctggtaaaagatgtgtagattcttctgttttaatagcatgtatttttcaaagttatgaattaatagaggaattaaatgtctatgataatatttatttaacaaaggatagaagtctttcatttgattttattgaggaattaggactaacagaattattatctcgttatcctaaagaactttcacaaggacaaaaacaaagagtcgggatagctcgagcattagcttgttgcccacaggtcattatatgtgatgagccaacagaatcattagatattgaaaacaaagaaagagttttaaacttattaaaaaaattatctcaagattgtgttgttattgtagcgacacatgatatatcaatgttacaagactatgctgattatcattatgttattgaggataattcattgattttacaaactcaaaagcaacaagcacctacacttactgttgaagaaagaaaaacttcatatcatgaattgaaaagaattattcatcaaatgattcataaaagaacgatgattcaaaccttgtttttaagtctacttattatttttcaaattattacatttcaaattaatggtattctttttcaagaaaaaacaagttatcaagttgtaaatcaaaatagtctctatgttaaaacaaatggaatgaatccagattctttatacaaatatggtgaaatacgtccaattcttaattttgatacattgaacctcaataataaaatctataagatgaatatttatcctttacctacaacaagtcaaaaccaattaaaagataatcaaattctcattaatcaaaatacagcaaaagttttaatgaatgaatggcaagttaatcaagaatctttaatcaaccatcaaattctcttatcctatcaaatgggtagtcaaatttatcaaatagaatgtacaataaaagatattattgaagaagatttaaaagatgttaaacaaatttattattcttatgatggaataaattctcttttaaaacaaaaaagattttctaaagaatatccaacacaatatgattatcttatgaaaaaaggagaatcgtttgaaatccaatgttcatcaacacaagttcaagattattatcaggtcttaaaaggaaaatcaaagttaacagtaaatcacagcatttttacatcacttcatcaaaatcaaggacaaaaggatttgtactatgttttatttatgattgttcaaataatcttacttgctgttagtattatctatattgtttatatgacttaccaagatacaaaaaagaatcaagttggtttatcaattattcatgcttctggtgtagatttgcaattgattaagaaaagatattttatagaaaaactcaaatatttattgattgttttcatcagtgctttatttgtttgtcttattttagaatggcaatttcatcaaaccaaacgttcattaatttgtggtttatttgtaggagttattttatgtttctatgttcttatcttttatatacgattaagcaaacttcacaagaatcaaatttctattttattaaaagataataaagatgagtaaaaaataaaaaaattattttttgctcaatttttttaaataatagcaatataactgttttatcgcaagttttcattaattataagacaataatattattgataatcgaaaataagttatttgaccaatttaaaattaggttcgtatattcatggattgtaatatgttataatatacatagaaaaataatgcatgatatttagaataatcaagtaaataggagagttttttatggattatcatgtaaaaagaatgagtttatttattaagtttaaaagaatggaaattggtatctcacaaagagactttgcaaaatcaatatttgtgagtagaagtttaattgataatatagaaaatgggaaattaacatctttaaatcatcatattgataacatatttgaatgttttggtttggataaaagtcaatatattgatgatgactatgattttattaaaagattctatacggttattcatcgtgttatttattatgatttagataaaaatcctcaagatatcattgatgaattttattttaaaggaatagaaaatacatatctatatatatattatcaattactaaaaacctgcctatattcacgggaatatttaaatgatgaatttctttttaaatatattcctctctttgaaaatattattgatcaattcgatttattgattcagcaattttttcaaataacaaaatatatttattataaagaaaaaggtatgtttaataaatgtgtattaaacgataaaaatgtgaattttgatatgatgaacaatgatatgaaatcatattattaccatgcatatgcattacgttatatgtatgaaggggatttttataaacaattcaaatattttaacttggctaatgaatactgtttaaagatgaataatcaaaaaagattaattgcattgaaaattattgaatgtgatatttatgaaaaattaggggatatgaataaagttatagatatactatattcaaatatcaaaaaaattgatgaaatcaattttacaagtatgaaatatgtattcataagtaatttaggaattgagtattttaagataaaaaattacgcgtatgcaatacagtgtctaaaagtttcgtttctaaaaaacaatgataatttagatttattttatcttattttaagtcacatgttgctagataataaaaatgaagttaaaaggttattaaactatcaataccaagttgaatgttttaatgaaatatattatgaattaatagagtggtgtagtaaagcttaccaaagaccttatacaaaaaaatgtcaatatattctagaacgaatatataagcgttattttgcaagttcatcctatgatgctaaaaaacttattttaaatttattaatagataattatgaacatcatgaagattatcaaagggtaaataattatcagaaggaattaataaaattattagaaagtagaataaattgtgaaaaataatttgttatcattgattgttttttagcaaattgcatttatataaatcaacaggatatgaatgaaagatgtaggtgccaatatcaatcatatctcacaacaaccattgaacatggaatttctagaggtggaggatgttaaaatgtagtaaggtaagcaagttgtatattcaaaaataaaaaaagagatacatatgaaagtaagtcatttgtttttaaatgtaagtaagagagttatatcatgtttttgattccataatagaaaaatctatatatgttcgtaatgttagtggaataacaattggaaaaatcaaaacttatgttactgctacaataagaaatgttaatggaatttattctattgatttatacagatttagacaggagtgacaatgcaacagcaacggtatatgataaaagtaaatcaggaatgagtataaaagtgatatggcttgtcacaactaatttatctcatcaaatagttacagacttacaaactatgacatatgatttcagttaatcctctaaggattaactttttctataaagtgggtgataaaagatgttagaattaaatcatataaaaatgaattatggtcaaagaataatttatgattgtgcaaattttgtggcacataaaaatgaactaactattattatgggaaaatcagggagtggaaaatcaacacttcacaaaataataacgatgagtcttgatacacaaggtgagtattttattgatacaaaagatatgaataaattgtcaaataaagagaaaaaacagtttattaaagaacatatgggaattgttaatcaaaatccaatatttataagggatttaacaataaatgatcatattaacctttgtcaatctttattaaatggatatcaagtagatgaatatgttcaattcttacaattagaagaagtattaaataaatatcccctgcaattatctagtggtgaaaaaatgagggttgcaatattattagctatgattcatcaaccagaaattttagtctttgatgaaccaacagcatcattggattcataccatacacatattgttgtagagatgataaaaaaatatgctcaaagtggacattacgttattgtttttacacatgataaaatattaaaagatgtagcagatagtctatatattatagaaaataataaattaacatcagtaacaagagaaaagggcaattataaaaatagtatttcattattaaaagcaaataaaaaatcttacttatattttttattcaagatgtataaacatcaattcttttttaagtcaatgacactattactaatttctttaactattgctattggttgtttctcaatatttcatggaaattcaactattcaatattatcaaaatcaacttaataaaactgaaaagacgggtattatatataaagaaaatatagattctttggggaaattatataatgaagaatatggttttagtgaattagaagttaaaggaataaaggaagtaaaaggggttaaaaatatttggccatatattatgacaagaaatcatgaggtaattcaaaatgatttgaaaagtgtaaatattaagatttatcaaaatggtcaattggtgcatgatttagattataaaaataatacatacacagttgctacatataaaaatgattataaatatgaaagcaatttaattaaaaaaatcaattccaatgaaggagtttatgtatcagcatatttattgtatgatctttttaatccagatgtagaaagatataataaaaaagatattgagaatagtgtacaaaaatatgatgaaaatacagaaattgaattccctataattgttccaatatataatttgcagtataaaaatcaaaaaggcaatcaattactaggtaaaacaatgactataaaaacgaaaattaaaggaatctattatcaagatataccgtttcaattttctaaaggaacaactacagatgtatcaatattttatccgttagatatagctttgaaatttattcaaaaaaacaaggcaagcacgaacgaattattgcaagatcaagtaaaatatcaaaatgacgaaggatatttgaccccattttatcctttatattatcaatttaatgtagataggggaatttcttttcggactgttaaagaaaatattgaggctaagggttataaagtattatcagattataatgatgcagaaaataatttagatattattcatcaattaaatagtggtttgcagatgatagcagtttttatatgtcttattactttatttatctcatttggaataaagtatactaagaaagaagaatacgatgattatttgaattttttcatggaaaaaggtttttcttatcaagaaacacgtaaaaagttaattcaaaaatttatgcttgaaagtattttttgtacaggggtttcaattatattatttatattaatggttattttaggaaactatctatattataatagcaaaacacatattcaaattgaatttattattataacagttgttttttctctaagtattgaagtattactaccactattggtattgggaagaaggaataaactatgatttcattagaaaatatatctattcgctataataaagttttaataaaaaaatcgtcaatgattattcatgataatagtgtaactttaattaaaggattaagtggaagtgggaaaacaacgttattatatcggattggacttatatctaaagaaaaaaagttacgatatgtttgggatgatattaatattcattcattgccaccatcaaaaataaatgagttacggcgttataaagtaggatatgtttttcaagatttttgtttatttgaagaaatgagtgtttacgaaaatatagaatattattgtcgagcagcccatcagcccattgatttacagaaggctattgaggttttgaagattgtacaaattgaagattttttggattgtaaaacaaaaaatctttcaaatggagaaaaacagcgattggcaattgcgtgtgcaatcgttaaagaccctgaagttattattcttgatgaaccaactagcgctttagatgaagataatgaaaagattgttttttctattttacaaagattagctcatgagaaagggaaaatggtcgtaatagcaagtcatagttatatttgtgatgattatgcagattatatatatacaataaaaaatcaagactatttcttgaaaagcagactgaaactaaagcaattgaaaaaaagaacagaaaaaatatatcttctatgtttattgtttattatcttaaacaatattttaaaaatcatccttttataaatatattgatgacatctattttaatatttggtgggatatgttcactttgtattcagggattaattcaagatacattaaatcagcttgatagtaaactaaatagtatatctgaaaatcagttgttaatattaggctcacaaggtaattctatacaactatataatggcaaagatatagaacaaaatattttagacaaaattcaatcattaaaaggtattaaaaaaatttatcctttgtataatttgtctgttgagttaaacaacaatatttatccagtatatccaatttttaatgaaaatcaattagatggaaaattatttaagcaatataattcacaacgaaatctttatttatcatatcttgtagcccttcgattagatcaatgggatgaacaagtgattttatctcggtttatttacaatgataataagacaatacaaacattggaaaatgtaaatggtgttttagcaattggaaaatcatcaggatatacagataatttaaattatgttttaatggattatcagaaaatcgttgaattagctaaaaataatcatatttctccaacaaaaaatgcatttgttttatttgctgataacctagaatccattcaatctatttcaaagacaatctctaatcaatttcatttagaagtagtagaacattttcaaaatgttaatgacttattaaatatgaaatatcaaacaatctcaagtatgtctactgaaaaagtttttgtagttattttaagtgtcatattatttttatatttaagctattggaatatgaaaaagcgacaaaaagaatttgtattattatatgttaatggaattagtcattttgaattgatctcaattatttttgttgatttgtttattaaaattattattgccctttgtataactttaatatcttgtgaattattagataaattgatatttacaatatttaatacaaaagaggtcatttcatactttttaagaacagtatttattgttgtaataggtttattattaataagtattggatttataaagaatatagatccagaagaaacattaagaaattaaaaaagatgattataaataaatcatctttttcatatctttttcacaaatttatattataatgtgattaaagtgaggtgctagggatgaaagtcttattgatagaggatgagaagctaattcgtatgtttattgttgaatattttgataaacaaaaggcgagtgttgttgaagcaagtgatggttatgaagggttatctttgttagatgattcttttgatattgtgttattagatattatgatgccaggtattgatgggtatgaagtttgtaagttgattagacaaaagagtgatgtgcctatcttatttattagtgcattaagtgaagatgataataagttgaagggttatgatttaggtgctgatgattttatttctaaaccatttacaccttcgttattgtatgcaaaatgtaaagctttattaaaacgtgtgaataaagaaaatcgttctttagatgtagggattattcatattgatgaagatacacatgaagtgtatattcgtgatgaattgattcagttgtctaataaagaatatttgttgttgatatattttattgaaaatagacgaaagattttatctagagatcaattattagatcatatttggggttatgattattatggggatcaaagaattgttgatacctatgtgaagaagttacgtaagaaattattagatgctgccccttatattcaaacagttgttaagattggctatatgtttgatttgaaggagttatagttatgaaaaaactgaatttcagtttgattattaaggttactggggttgtttttattgcattttcaattgtattaggaaatgaaattcgtttaggaattaatcgttatacaaagaatacattggatacagatgcagaagctattgttcgtaatcttgataaatttgctaagtcttatactcaaagtatagctattaataaagttaatttaaattcgacagaatttaaaaatatatatcgtgatgctttggctggtgatggaaccaaggttaaatgtctaatgaatgcaaagggacagattctagatgtttctcgagaaggtgaaggttttccaggtattggagttattgtttctaagtataaaggggcaacgaattggccagtttattttgatttatcttctatggatagcaccagtttaatgaagatagaaagtgaattattaaagcataaagatgaaaagaatacaattacgttaaagattgtgacaaatagtcaaagtgaacttaatagtaatatatttgataatatttttattaaagaattgaaacttaataatcagattatttatgtcagcaatacgaaaggtaaagttcaaacaatggagggaacggttggttcctatgccagctataatctagaaattgcatttcctagtacacttacagaaagtaaaaaacaatcaacaaatacatcaggtaagaaaagtcgaacaatgattttagattaccaaaatgccatgaatgggctaagagaacaaatcactaaaaactttaaaacatttaaaaagagtggtcgtgaactcacaacaactaattactctatttataagattttaaatccttatgaatataatggaaaatattattctacagtcatgttaagattagaagattggggtttaatgaatggtgaagatacaactgtggattatacagatgaggcatcattagataaagtaactgcaggatatatatttgttattcaggaatatacaaatctcacaatgcgttcctttagacaatttatgcatgataactcatcaacttatctcttagcatttgttttaattattttgatttgtctatccatagcatatatggttattaaaccaatccgtcgaattgaaaccacagcaaaacatattgctagaaaagaatttgattatcctattgatacaaccaggcatgatgaattaggtgatttgtcgcgtagtattgatcgtatgagtaaggaattagaaagtacaattaacaatcttcatcaagaaatcgaacgtgttcaaagattagaagttattagaaaagaatttgtttctaattttactcatgaaataaaaacaccattagggattattaatgggtttagtgaacttgttgaaattgaacaagatgaaaagaaacgtaatgaatatattactattattcaaaatgaaaccaaacgtataaatgaacttgttttagcaatgttagatttatctaaactagaatcacaaaaggtttcattaaaactagaggaagttgatttattagatatcgtaggggattgtttagattcaatgatgtatttgtttgaaagaaaacaaatcaaagtacatactcaattagattcctcaatggtaaaagcagatcgctttaaaattgaaatggttattgacaattttattagtaatgcattaagatatacagctgagggaaaaaatgtctatgttcgtttagatgaacatggatttgaaattgaaaatgagggacatccaattcctaaagatgatttagaaaaaatatggttaacgttccataaagttgatcgttcaagaaatgctgaaggaacaggtctagggcttgcgatttgtaaagctattttagatcttcatcattttgaatatggagttaaaaatactgaaaaaggagttctcttttactttaagtattaagagaatttcttttttgtttactttaagcaattgataaaagtttgctttgtgctataatatgggtagatgaaaagttttttaactttttttaagaaaaaagaagaaaaatcagactttgcaagcgtatatataagtatagggatttatatttcctcagtgtttttcaactataaaaaggaggaaaaataattatgagtttacttattcaaaaacaaacaaaactgatttctaagcctgatctgatttacaaggatttctttaaaaaagttgaaaactttatggatttgatgaatgctttgctttttcagggaagggcactcattgatgaaaacagtcttgtcttatgtgatgccaatgcaacgacgcattttgagtttgatgatgaggtgattggcgttggcaaacaaagagatgttctgatgaagtgtacagtcaatggggtagcgattctgctgggtctggagaatcaatcaacggttgactattctatgccttttcgtgtcatggattacgatacgattacatatcagcagcagttcaaccttcaggatgaggacaagcgtcaatcatttcatcccattcccgtcttaacacttgttttatatagtggagataagctgtggcatcagccatattcactgatagagcggatggaaataccagaagccttgaaaggatgggtgaataactggaatggaaatatctatgatatcaaggatatcagggtagaatggttaaagaatccaaaggttaaagcagtcattgaaggtgtccagagaatctatcaatgggatcgggataaagaaagcttgaatgatctgatattaagtaaagaggaagcaattgtagtagcgataatgaccaatagtgaagaattggttatcagattagagaaagaagaaagtgaggagatcaagatgtgtgaagtgattgacagttatgcaagagaaagagagctacaaggaatgaagcaagggatgaagcaaggaatcaagcaaggtgaattgcaaggaatgatgaaagagaaaatatcattgcttgttagacaattgaaacagaaactaggacatgtatcaaaagagttagtgatgcaaatagaagtcagtccagaggacaagttagaccaattgacaatcaagatttttgatgttgaagatgaagaagatgttttagaaatattatcttaattgatatttgaaaagaaacctatattgggtttctttttaacttgtaataaaaaataaaacatctttctaatgtgacaaataatttaaaaagaagggactataatgcatgtgagaggtgaaaatatggaactgattatcaatccaagtcgtacaaaaaaaataaaattacagtttgttatttatataacgctcatttcttttctagtctcattggtcagtattcaccatacatcattattatttgttttacctttgttttatttatgttttatgtgtggatatcgagcgttattaagttatttagtaggtttattgataggaattatctttttgaaagttccttatgaagtattagttattagtttatttgcttttgtattattgcagttttgtttattgtttcaatcaatgaaatcaaggtatgttccttatttattaacattgattggtggtatttattatgcttacatacaaatcgatttattatcaaccttattactaactgtattaacttactttaatactattatctttgcttatttagcaccattatttatgcatggggaatccgaattattaacacatgtaagagtaaaagcattggcagtcgttgttttaatctgtatgatgagtttattgccttattcacaaattatcacaatgattcttattcgtgtctttattttagttatgatttatcatgaatgtttagatgatttactaccaggtttattttatgcttctatgttgatgttgttgatgaatttaggttataaagatgacattctatcatttctaattcctttatttttcttttatatggttaaatgtcaaaacaaactatcgattacatccttatactttgtttctcatttaattcttccattcttcttagaatttagttatccatatcatggagttattgttgctatgagtggaattatctttgcaattataccaattcataaaactaagccattattatcatcaagttatcaagaaatgacaatgaaacaacaactttcaaaacaagttgattctttctgtcgtctttttgaacaaatgacagctttatttacaacagctccacaaagaagtcattctttagaatacataggttatatttatgaggatatgtgtcaaaattgtacgagtcaagaaacttgttttcataagaaatatgggccaaatcgcttagttaagttaatgaataaagggttaaaagagcactatagtgaaagtgatgaagattttatttatcattattgtttaaaacctgaacaatattttcaaactataaaagcttatcaaaaaaattatcgtaaagttcatcgtgttcaacaagaatatcaaacaatgaaaaaagatctttatcatcaattttctttattaaatgatgtctttcatcaattctctagtcaattaaagattggacatattgaagaatcacatattttagaacatatggaaggttatcattttcaaattgctcatttgaaaaaatattatgaatctcaatcggtttattatattgaaattggtttatatgaaattaataaagaagaaattgagaatgaatttattcctatcttagaagcttatttgaatgaaacattagatatagaagtcttaaaaacaccaatgcatcaattaggttatacatatttagttttaaaacatcatacgcgttattatgttcaatatggtatttctcaatgtgcaaaagatccagttgcttgtggggatagttatggggtttttgcaatggatgagaaccagtattttgctgtgagtgatggaatgggacaaggacaaaaagccagtgatgattcttcacttacaattgatgttatgaaacagttgattgttaatgggatttctttaaatgatactgttcaatcggttaatgcattattaaaaataaaaaatcgtaatgatatgtttacaactgttgatatggctcaaattaatttagtaacaggagacttaacaatggttaaatatggagcctgtccaacttatatcttaagagatcaagaactgattgaaattgcttcttcatctttacctatgggaattgtttcaccattagaaacatcaatggaaaaatatcaattaaaaacaaatgatattgtctttattgtgaccgatggctttacaagtcattttaaagactttatagaaagtaataagtatttaattgatgatgatcatcctaaagaaatcgctcatcttttaacaaatttagccagtgatgaagataaaaatgatgatatgacattagtcgtattaaagctttgtaaacaataatcccaaaaatattgggatttttgtttttgaattcatatttctttgatataatgggctcggaagtgataaaatgaatgaacaacttttaaataaaacaaagtattatgtcattggtgtctcaggtggttgtgattctatgtatttattagatacattacgtaaggcaggatatcatttgcttgttgctcatgtgaattataattaccgtcatgatagttatatagattatgaacttgtctgtgattattgtgcaacgtatggaattcctttttactataaagaatttcattcgcaagattaccatgatggcaattttcaggatcaggcacgcagtttaagatatgacttttataaagaaatctatgatttatataaatgtgatggattgattttaggacatcacttagatgatcatttagaaacaatctatatgcaacttagtaaacataatgtaattcattatttaggaatcaaggaagaaagttatgttcaagatatgcgtgtagttcgtcctttgatggattgttataaggaagatattttacaggcatgcaagataagacagattccttatcatgatgattatacaaactttgaaattgactttgaaagagataaagtgagaaatactgttttaaatcgttataccaaagaacaaaaagaagctctcttaaaaagagcgcaaaagcataaccaacgaattaaagaattagagtttaaagttcaaccttattaccaacaatatatatcagatggacagatatactattattacattcctaaagatttaagagatatgttcttatatttgattttaagagatgttatgcatccacaattaatttcacaatcattgattgctgaaattaaacatcagattaacagtgtgaaaccaaatattcaaatgaatttaccagttaattatctgttcataaaagaatacgataatatctatatcattgataaagataaaacaaaaggatattgttatgaatttaaagaatttattccttttggctgtgaatattttcatttgttagataatggacatatcaatgaaggggtgtatcttagccaagatgattaccctataacggtgcgaacaatgcgtgaaggtgacagcatcatgacaagtgctggcacaaagaaactttcacgtctgtttattaatgcaaaaatacctgcattaaagcgaaaaacgtggccagttgtcttaaataaggaccaaactatcattttagtgccacatattgcaaaaaacattgattatttgactacaaaaccaaatgtatttgtgataaaataggataaccattataaggagtgagcaaagtatgcataaagatgtcaaagagatattatttactcaagaagaaatctctgaaaaatgtaaagaattaggaaaactcattatgaatgactatcaagataaagaattggtattggttggactattaaaagggtctgtcccttttttagctgaactttctaaatttattgatcttgatgtcacttttgactatatggatgtgagtagctatgaaggtgttgaatctcgttcaattaccatcaaaaaagatttagatcaagatgtgaaaggaaaagatattttattagtagaagatatcttggatacaggtaagactttatcaacagttaaagcgatgttagaagaacgtggtgcagcttctgttgagattgtgacaatgctagataagaaagaaggaagaactttcccaattgaagcaaaatatgcaggatttgaaattcctaatgcatttgtcattggttttggattagattttaatgagaaatatagaaacttaccttatgtaggtattttaaaagaagaatgttatcaataatgaaggagatcgtatgaacaacaaaaacaaaagtttatttaaagcgataatgccttggctagttgtgattgttttattgagttcacttgttccatttttaaatagtggaaaatcaagtgaagtgaactacaatcaatttgtaaagattgttgatcaagaaaaagtcagtgagattacagtgatgccaggtatttacgtaacaagtgttgaaggtaaatatcaaaaagaagaaaaaggtaaaaaagtaagttattcgtttaagacaaatgttcctcaaacagatgaagaattaaattcattaatgcaattatttcaagataaaagcattaatgtaaaagtcttagatgctaaaagtgaaaacatgttaatggatgccattttaggcttattaccatatgtattgttaattggggcaatggtattcgttatgcgtagtattggtggaggcggaggtgctaatgccaaagctttcgattttggaaattctcgtgctaagctagaaaaagatagtaagacaagatttagtgatgttgcgggagctgatgaagaaaaagaagaattaacagaattagttgatttcttaaagaatcctaagaaatttgtcaatatgggagcaaaaattcctagaggtgttttattagtagggcctccaggtacaggtaaaactttacttgcaagagctgttgcgggtgaagccaatgttcctttctattcaatttctggttctgagttcgttgaaatgtttgttggtgttggagctggacgtgttcgtgacatgttcaagaaagctaaacaaaatgcaccatgtatcatttttattgatgaaattgatgctgttggtcgtcaaagaggaactggtgttggtggtggacacgatgaacgtgaacaaacattgaaccaattattagttgaaatggatggtttcagtggaaatgaaggaattatcattttagctgctacaaaccgtgctgatgttttggaccctgcattacttcgtccaggacgttttgatagacaaattcaagttgcaaatcctgataagaaagcaagagctgagattttaagagttcatgctagaaataagaaatttgctcctgatgttaactttgataacgttgcacaacgtacaccaggattctctggtgcagagcttgctaacgtattaaacgaagcagctttattagcagtacgtcaaggacatcaattgattactttagatgatgttgatgaagctattgaccgtgttattggtggaccagctaagaagtcacgtaagtatacagaaagagaaagaaaattagttgcttatcatgaagctggacatgcgattattggtttaacgttagaagatgctaataaggtacaaaaagtaacaattattccaagaggtcaagctggtggatataacttaatgacacctaaggaagaaacatatttccaaacaaaaacacaattaaaagcaagtatcactggttttatgggtggtcgtgttgctgaagaagtgttctttggagatgttacttcaggtgcgcataatgatattgaacaagcaacacgtattgcaagattgatggttactgaattaggtatgtctgaattaggacctatcaaatatgcttcaggtcaagatgcagtattcttaggtagagattattcttcaacaagtaatactcactctggtcaagtagcatatgaaattgatcaacaagtacgtaagattattgatgaatgttatgaacaatgtcgtcaaattattgttgctcaaaaagataaattggtcgttattgctgatgctttattagaatatgaaacattaaataatgaacaaattgaatctttatataacacaggtcaaatgttagaagcacatagtggaaaaattgatgatgatcatcataaagatattactttcccagatgctccaaaaacacctaaacctgtagatttagatgatgatttattagatgaaatgaaataagcgcaatgcgcttattttcgtaaggagaaaaagatgaaaagaagtacaataagtaaaatattagtattcattttagtcattagtatgattcttcctttaattggatattttgcgtttggaggataagaagatgaaagattatttagtgagaggtattgttgaatcaaagaattgtagagtttttgcctgtcaaacaactgaattattagaagttgcgagaaaaaaacatggtttatggccaactgcttcagcagcattaggacgtatgatgtcagcaactttaatgatgggagcaatgaataagaatcatgagaaaatgacaattactattaatggtggtggtcctattggcagcatgattgcttcgacaaatagtgatggaaagattaaagcttttgttgctaatcctgaggtgcattatacttataatgatactggtaaattagctgtaggggtagctgtaggaaaagaaggaactttacaagttatcaaggatatgggattaaaagaaccgtttgtaggtactgttcctctccaaagtggagaaattggtgatgatttttcatattattttatggtttctgaacaaattccttctgttgtttcattaggagtacttgttaatgatacaaatgagatattatctagtggtggatttattattcaattattacctgatgctagtgaagaagatattgaatatattgaaaataaaatgaaagattttccagctgtttcttcattgattcatgaaggaaaaacaccagaagatatcttaaagatgttgtttgatgatgtagatatcttagaaagtcaagatttggcttttgaatgtgattgttctaaagataaaatgagtggagccttaatgacagttggtaaagatgaaattcaagcaatgattgatgaggatcatggttgtgaaatgcgttgtcatttctgtaatactgcttatcaatttagtgaagatgaattaaaagaattattaaaacaaatgaagtaagacattgttcttactttttttgtataatacgaaaaagaaggcacggatgggggttgtaccttcttcttctgggtttaccaatattaggaatataactaatcgataacttacatctattttaatggggaggaaaaaatagaggggaaagtgtaagctatctgtatatatcattgacgattgtaaaagttttatacatataaattaaaaaaaataataagaaggttgagggggagaaaataagaccttcttattattataagagtaacgtttgggatgggagttaagtcactctttgatttgatatcatgaagaaatttttaaaactgtcaattttatctatttacttctttatcgcctcctacgagtataaatatatcatttatttgtctttgttttataaaagaattatgttatattgtgttatggtgaaaaaagatgaagataggaaatgtagaaattaagaatagaattattatggcgccaatggcaggcattacaaatgtagcttttcgtaagattattaaagagtttggtgctggacttgttgttagtgaaatggttagtgataaagctttatgttatggaaatcaaaaaacaattgaaatgttaacaattgatgaaaatgaacatcctgtgagtattcaaatttttggtggagatgtagagtctatggtcacagcggctaagtttgttgatgaacattctaattgtgatattattgatatcaatatgggatgtccagtaaataaagtcttaaaggctcatgctggaagttatttattgcagttccctgatttggtttatgatattgtgaagaatgttgtagaagcagtgagtaaaccagtaacagttaagattagaattggttatgattttgattcaattaattgtattgaaatagctaagctgattgaaaaagctggagcaagtgcaattgctgtgcatggtagaacacgttcacaaatgtatgaagggcatgctgattggtcttggataaagaaagtcaaagaagctgtaagtattccggttattggtaatggagatgtcaaaactgcacaagatgctaaaagaatgctagaagaaacaggttgtgatgctgtgatggttggacgtgcagcacttggaaatccttgggttattaaacaaatggtcgaatatgttgaaaatggagtcttgttagaagaaccaactattgatgaaaagattgatcaatgtttacaacatgccaaacgacttattccagttgaaggagaaaagaatgccattcgtcaaatgcgtggacatgctccttggtatatgaagggtttgaaatcttctgcacaagtgaaaaatcgtttatcgcgtattgaaacatatcaagaattagaagatattttagaagcttatcgtcattatttacatactggggataaatcagaatttgaaaagtttgcatgatttatgttagacttttaatgaaagcgttgacatgaaaaaagagtcatgatattatgaaagtgtaatttatggattgttatagcacaaattgaggctacacaaaacctgtttacagatattttttctgttgacaggtttttttattggaaggaggatctttatgattattaagaaaatactaaataataatgttgttattacattaaatgagcatcatgaagaaattgttgtcatgggcaaaggattggcatatggcaaaaaaactggtgattatattgatccttctaaaattaataaaacctttgaagtgagtttaaaaacaagtcaaaagaagatgattaatatgttaaaagatattcctattgaatatatggaaatatctgatgaagtgattcaaaaagcaagaaaagaattagatagtgatatagacgattctttatatattagtttaactgatcatattcatacgagtattgaaagatataaagaaggaatcccattaaagaatcaattgttatttgaaattaaacatttctataagaaagaatatgaattagggttatgggcattatcacttattcaagataaatatcatattgatatggatgaagatgaagcagggtttattgcaatgcatattgtgagtagcgaaatgggtagaaatattagtgatgtatatgaaatgacaaattttattcaagaaatattaaaaatagtaagagaatattttatgttacaatttgatgaagaatctttatcttattatcgctttataacacatttaaaattctttggtctgcgtgtttttaatcaaacaaaacataatcaagatgattctttaaataatgatttacttgaaattatgaaagaaaaatatgttaaaccatatttatgtgcattagaaattaaaagttttattgaaagaaaatatcaatatgaattagaagatgaagagattttgtttttgactatacatgttgcaaaaatcatttctaacaagtaaaggaggataggagaataagaagtggtttgcatataaatcgttggatggtaacattgagttggccaaaccttcatgaaatttgaagttttcaaaaagaatggaggaaatgaaaatgaaatatgaaaaactttcaaaagagattattgaagcagttggaggaaaagataatatcatatctgtccaacattgtatgacgcgtttaagatttagtttaaaagatgaatctaaagctaatgacgaaatgattaagaatattgatggggttttatcattggttaaaaaaggtggacaatatcaagttgttattgggacacatgttcatgatgtttatttagatttatgtaagattgctgatattaaagaagaacaggaagaagaaaaaccagaaaagaaaaagaatctttttaatgcaatgttttcagcaattattggggctattggccctattattccaattcttgtaggcactggacttggaaaatgtattttattgatgatttcaacaatgggttgggctaatgctgaaacatctatgactttttatatttttaactttgtatttgatgcaggatttacatttttaccagtgtttgttgctgtagcagcagctaaacattttaaatgtaatatgtttatggcagcattattaggatgtgcattggttcatcctaattggaatggaattgtttctgcaactgatccaaaatttattggacaaatatttggtttcttacctgtttatggtatgccatatacatcatcattaattcctgctttattaatggtatgggttatgagtaaggttgaatggactttgaataaatatatacctgatttattaaaaggaatgttaacaccattattaactttattaattatgacaccattaacatttgttgttttagcacctgcaatgggtattatttctatttatttaggtaatgcattattatgggtatacaatacatttggaatgtttgctattgcaattatgtgtattatttatccttggatggttgtgacaggaatgcattcaactttagcaattgctgggattcaaattttatcacaatctggatatgatccattttcaagaacattaaccttgacagccaatatggcacaaggcgcagctgcgacagcatgtgcagtgaaaacaaaaaataaacaatttagaacaacatgtatctcagctgcatttacagccttctttgcaggtattactgaaccatgtatttatggtgtgtcattaagattaaagaagccaatgtatgctgttatgattggaagctgtttaggtggattgtatgcaggattctgtggattaaaagcttttgcatttatgacacctagtgttattaatttcccaatgtggatgggtggtagtggtagttcaaatttggtaaatgcaattattacaatgattatttcagcagtaggtacttttatagcaacattagttattggttttgaagatccaaaggaagaaggagaagaaacacaagaaacaaaagaacaactcaacaataatattcttcttgtacattctccaattgaagggatagttattgatttgaatgaagtgaatgatgaaatgttttcaggtgaagtccttggaaaaggagttgctattattcctaataacgggaaaatttatgcgccagaagatggtgtgattacagctacttttgaaacaaaacatgccataggattaacaacagataaaggtgtagaaatattaattcatattgggattgatactgtaaaattagaaggtaaaccatttgttcaatgtgtgaataaaggtcagaaggtaaaacaaggtgatttattagtggaatttgatatgtcagaaataaaaaaagctgatttagatcctacaactatggttgttgtcacaaattctgataaatttttagaagtgattccaacaaaacaaaaaactgtaaatcaaaatgatacacttttaacaattatttagtgaggtaaaattatgatatatgctgatttacatgttcatacaaatcatagtgatggaacacagtctattgattcggtttttaagcaagctaaggaaaaaggaatacataccatagctattacagatcatgatacagttaatcattatcaagaaattttattagtagcgcaaaaatatcagttagaaacaattcgtggagttgaaatgagttgttatgatgaagttgttggaaaaaagattcatattgtaggtttatggttaaatgaagaagttccacatgttgaaaagttatgtcaagaaacattgaagtgtcgtgatcagtatcatcaccatcttattgaactcttaaaccaaaaggggtatgatataagttatgaagatgcaaaggcattttcaccttataatattgtttttaaaattcatattttcttagctttaatgaaaaaatatcctgatgaaatgagtataagtcgttatcgtgaattatttgcagggcagacttcacgtgatgttgatcgacaaatgggctatattgatattcaaaaaggaattgaagctatacatttagatggtggaattgccatattggcacatccttgtgaatatgataattatgatgaaattgaaaaatatgttggatttggattagatggtattgaagtttctcatccaagcatgcagcaagaagattatcctagaactttagaatatgctaaaaaacttcatctcttaaaaagtggtggtagtgattttcatgatgaacgtctcactattttaggaaaatttggattaacaaaagaacaatatgaattattaatgagaaaggttcataaaatatgagagagttaaagatttgtaattttagagacgtgagtggatataaaaataagtatggtgaaaccatgaaaccaaataaaatatttagaggggcatcgttagatgccatctctttggatgatgcaaagtatatggaagatcaattaggtattcgttatattttagattatcgtgatgaacaagaagcaatgctagctaaggatattgattttcctaatgctcaatatgaacgtataagtgctttgacgattaaagaacatactgataatggatttgattttggaaaaatgctggaaggtaaaatgacacctgataagttaaaatttttaattcaatacattcgtgagggatatcaaacaatggcatttgataatccagcttatcatcgtttatttgagttgttattgagggatgaggggcatatttatttccattgttcagcgggtaaagatcgtacaggagttagtgcatttttaattatgattgctttagggatgagtgaggaagatgccattgatgaatatatgttatcaaatgaatatcttcatgattttgttgaagatttttataaacaacatcatattcctaagatatttagaaaatattgtgatcctttgttgttggtggaaaaagaaaatattatgttaacaattcaatctattaaagaaagatatacaagctatgatgagtttttagaaaaagaatatgacttagatgaaaagaaaagggagttgttaagaagaatatattgtgaataggagatggtaaaatgccaaatatgatgattcattgggaatggtttttaagaattattattgctggtttatgtggtgctatcattgggtatgaaagaagaaatagaaataaagaagcaggtattagaacacatgctattattgcattaagtgctgctttgattatggttgtttctaaatatggatttcctgatgttgttgagtatgatgctgctcgtatggctgctcaaattgttagtggcgttggttttttaggagcaggggttatattcgtaagacatggaacagtttctggtttaactacggctgctggtatttgggcaactgctggagtagggtcatgcattgggagtggactttatgatgttggtattctttctacactttttgtggtagggttacaatttatgtttcatcatggtattttaagaaaatatgcgaatcaaggacaaattatacaattacagatttcacaagatgtttctgctttatctgatattcagcatacaatgaaaaaatatgggattgcaattcaatcaatgaaagttgaagttttagatagaaatacgctttttattgaaatagatggtgtgacaccacagacttttaatagagaagaacttttagaagaaatgatgaataaaaattatatgaaaatgtttagttatgcataaaaaatattgatgaataaaagaaaaaccaagttcttaacttgacaagaacttggtttatttatataatacatgcgtatagaaaaaaggctgtgaatagacaagtaattgttatgatgtatgactagagagtcctgatggtggaaatggatgataatattaacaatgaataaagactaggagctgtattttggatcaaaggtgataaaataacgtgtgccgcgttacaggctagactctgataggagttgaaaagattactatagtgatatagtaatgaattagggtggtaacacgatatctctcgtcccttgtggatgggagttttttatttggaaaggagaaaatgatggaagaaagacaatttagtgaacaagaattagtaagacgtgaaaagttagagtttttaaaagaaagaggaattgatccttttggacaaagatttgatgtgactcatttttctgaacaaattaaagaagaatttgctgggaaaacacatgaagaattagaagaaatggcagtacctgttaaagtggctggaagaattatgacaaaacgtcgtaaaggaaaagtctgctttatgcatattcaagatagagatggaaagattcaaatctatgtaagaaaagatgttattggtgaagaagattatgaagttttaatcaagagtgatattggtgatattgttggtattgaaggaactgtttttgttacaaatacaggtgaactttcagttaaagcaacaaaatatattcacttaacaaaagcattacgtcctttacctgaaaaatatcatggtttaagtgatgttgaagaaagatatagaagaagatatgttgatttaattatgaatgaagaatcaagaaagattgcttttgcaagacctaaaattattcgttcaattcaaaattatttagatggtcaaggatatgttgaagtagaaactccagttttaaatcctattttagggggagctgctgctagaccatttataactcatcataatactttggatactgatttctatttaagaattgctactgaattatctttaaagagattaattgttggtggtatggatgcggtttatgaaattggaagattgtttagaaatgaaggaatggatagaacacacaatcctgaatttacaacaattgaagtttataaagcatttagtgatcttgaagggatgatggatttaactgaaggtattatttctaatgctgcaaaggttgtttgtggaacttatgatattgaatataaaggacatcaattatcattagctcctggatttaaacgtatttctatgactgatgcaattaaagaaaagactggtattgattttgctagtgatatgacttttgaagaagcaaaagcattagctgaagaaagacatattgaagtagaacctcactttggttatggtcatattattaatgctttctttgaagaatatgtagaagaaacaattgttgaacctacttttgtatatggacatccaattgaaatctctccacttgcaaagaaaaacttagatgatccacgttttacacaacgttttgaattatttatttgtggtaatgaatatgcaaatgcatttactgaattaaatgatcctattgatcaatatgaaagatttgctaatcaattaaaagaaaaagaattaggtaatgatgaagcaaatgaaatggatttagattatgtagaagcattagaatatggtttaccaccaacaggtggaatgggtatgggaattgatagacttgttatgttattaactgggcaagaatctattcaagaggtaattttatttccacaaatgcgtccaaaaaagtagcgataaaatcgatataatttgaatttttgaagaaaaattgaatacagaaaaagcataactctcattcagcttaagtcttaatatagggcttaatgtgaacttattagttatgcttttttatttataatgcaagttgtttataagtataggtggcatacaaatggcatacaactcataaattttctatgaaatctattagatttttacgacttttttcatagacatgagcatatgtgcctcgtaacatctcaacactatgtcccaatctttcagcaataagtaattcaggaatcataggatttgatagtaaataactcgcatgagaatgtctgagtccatggacagtaattttttttactctcgattttgctacatctttattaaaccatcttctaaatgtggctattgaaatatattttttatctctataaagaaaataactttcactaaatccttcttgttgagaaacaatagcatatcttattttaagtttttcaactattttattcggaagccgaattgttctattggaattattagatttaggagatgtaatttcagtaatggttgcacttaaacttttatttattgtaagataaccgttatctaaatcaacatcagaccattgtaaagcacaaaactctcctattctaacgccagttaaaaacataaattcatataaatctcgtttatattcatcttcaaccgttaaaatgaatttattatattcgtcaatttcccagaaattattttcactgctttttttgtttgaaaccttattaggatcctttggtggttttatcttatggcatggatttttatttaaccaattatgatcaacagcgtaagttagtaatcctgataagtgtaataggatattcttcgtagatgattctccataattttgaccattataaccattctttaatatgtcatttatccatcttgtaatctctaatgttgtaatttcatctatatatctatttccaaaacttggtgaaatgatatttctttcaaacctcatataaatttttattgtagattgtttgatatgattaggagcatctttatgatactccttaatcaattcatcaagttttaaacgtccaggtaagatatttgattgtgtttttaaaaactccatttcagcaatctttgcatctttcttatttttaaaacctcgacgtttataattttttcgctttccatttaagtcttttggtaactttccataaaatgaccacgttccattactttctttttgttgtgccactataatgttactcctgctaatattttatttctgtattgtgagatagtttcttcacacttttttctgttttcaactgtttctcgacttaggatagctttttctctattgcttacatcaagaccgatatagtcctcttggaaagctctaatgactttttgtggaaacatataattttttccaattttaataccattaataataccaacttctcttagcattgatactgtattaacatgcacatgtaaggcattggctacatcttctcttgttaacatttttaattcttccatatataatacctcctatcgtgataaatctttaaatgtatgattattattttgatttgtgatgagttcatcatctggtaagttatgattatctaaaaaagtaattctttcttttaatgtatcgaacatatgtgttactttattgattgtttttgaacagatatctttgattgaacgtatattgattgataaatcattttgcaagaatattcttttgaattccttaaatatattttctaatccaattagggaaagaaatgattcatgaataaataattgtcgttctaatttatctttattttttaataaattaagatttctcctttgtaagtcatggatatcatattcatgatcatcaattcttttttctagattttctattgaagaataaagattatttatgactttttctttttcttcaactcttctagctaaaggcataactctatacatatctatttctttcttttgaacattaataatttttatgagtttatcattatcaattgaaagtcttttatttgaaatagttaattctttgataactttattagcttgcgatagagatttgactttagtgattaatgagccctcatatttgatattttcggcttgtgtggcgagttcttttgaaacagctatattatctcgaatgttatttttagccttttgtaggcaaatatcttcctgattttttaattctttgatggttctgtttccattgatagtagcaccattaagaatttcaggcctatatccaagcaatggttcaatataatcagttagacgtgtatgaaagtttttaagatgtgttcttgttatgagttttttacaatttaatttttcgatattattatcgataataactggaacaaaaccaacatgaatatgtggtgtcttttcatctttatgaacccaagcactaacaatattatcttgaccatattcttgtttcatgaaattaaacactgactcaaagaatttttgttcatcatcttctgtgagatttttaggtaaagtaacgatccaatcaaccataacaacgatatcttttctgttgatatgtttgacttcattaagtcgtttggaaataaattcttcaggacgtaatggttgcatagattgtgcaagattataattatattgacttctattgatatcaatatctttattagccaactcacatccagctctacgttcataatggattgctaaacctacaatactacttctgtgaaacttttgggcatgagccatataatgtattcctccttatagcccccggcagggcaagtttccaaaaagcgcaagcattttggtataacttgctagaccaatgtttttggtctttttctttaaagattgccgataggcgttatatttaattttcaaatttctatttgtgacacaatgacagatgatttgtgtacagaaaacgactgtcatactgtcacttgttgaatatcttcttcatgatactcaatagtaatggttcttttttgaccgtttctttcgttatgaaaagtaatgttattttcttcaaggtactgttggttttgcttaagatacttagtaaggtaattaggattaatttccattttactcttttgaacaatttcttgacatgtgcctcgtaagatatgttctttttcgttgactactgtatttatgagagaaagtatatttttaggtatttcctcagtagtgctgtttttatcttcatctaataaccaaccgatattgttttcatcttttttaattttgatgattgatttgtttcctcttagaataagttttaattgaccatgtttatcaaattcattacgaactgaaagaagaagtgaaccagtagtagcacctgataatgcttttgaacctaacatattatcttggtctaatttttctttacctttttttgtatgatgaataataatacatactagttttttataaacgacatggtcacgtaattcttttaaaatagggtagacatcaaaataattatcattagaattaacgacttcttctagtcctacataagaatcaataataacaagtctatattgatcaatatcttgaatgtttgaaagaacttcattgatatcatgtatagactttgaatcattaaattcatatagtatttcgtcaataccaagtaaattgagagcaataattctgctttttgtctcaaaatcgtagttatcgttatcaaaataaatagctttacctttaggcattgatttgcctaaaaaatcagtaccattagcgatacaattagccatagtcgtagcaataattgacttacctactttacttgtgccagacaagacatataaacctggtttaagtatgtttccaaaaattgctttattttcagttttaaactctttttctaataattctctttgtgttattggcatataaaaactcctttcttaaaaattggtttgaaaggagactaattgtttgctataattctcttgaaagagcattataaaaacaagtctcttttcggttgtgactatctagaaagtttggcgatggactagatagtcttttcgtttgtatgaatgtttacagataaatcaaaatattgttctaccaagtttaatggtagggttcctgctttaggaagacgtttcttatcaatgttaaatgcttttataatacgtttagcatgaacttgtgcaacttgttgataactacatccaagtgcatctgctaattcatgataagttataaattttgattttaattccatttttcccacctcctcaaagattattatatcattatatatgataaatgcaacacaaaacaataaaatattatattatatatgatttatgcataaaatattatatactattagatatggaggaatgtatatgtcagtagcaacttatatttcaaatttacaaaaagaaaaaaatatttcttacatgcaattagctaaagaaataggaataacatatcaaaacatgatggatttaaaaaatggtagaattgccttgttttcagataaggtactaaccaaactatcggtttatgaaagtaggactaaactggatattttatatgattcaataaacgatgatcaatatgaaaaatcatctaaatgtgcattaaagtatttatgtcaatgtataattgatggatattctattacctttaaaccaaattatcctaacccgttcaaaattggaagaatctattttgaaggactcatttcaaagaaaagaattgttaataactatgctgtggtcgattcatgggaaaaaataaaaaaagagcatctagaacaatatagaaatattgaatattcaagagatgcatatattgatttatttataaatgaaaatatgtatattaatagtgttattaactatgcaataagtaaaattgatttagttcgagatgaaagattaagaacatatatcttaattgttggaaaaaatgtttcctatgatgagtctattattatgcaatacatacctcaaagaacaaagataaagattttagttttaagagagacagaaaatggatttataattattaagaactgaaaaacattatgaagtaatatgattgcttttgttgaaaatagaatatttgtctaatactttaaaggaaaagatatatataatgtgtcagattacaaagagaataagttgagatgtgtctattagacatttttgagctattaggtatttcttacatctaatgggctaattcataaacttgatttagttaaaaagaaatggtttaagtaataatcttatcttagcaattaatataatataaaacagcaaaactaagatattttaaattagtctttttaatgttttgaaatgtattgttttcatttttttattttttggaagtcattctagataaatctataggttttatgaatatcttattttgatgaatgaagttataaaacgtgctagtacaaatagcaacttcatcgtcaataagatcactgcagtgcaacttgcggtagataatagttactttatttggttttttctcgattaaaataataggatatttttgaagatttttaatatctagatgacagaaatcgatatgctattattaggacaaggcataccttgttctaataatttttaattccattttctttttataatacatatacacggattagaataaaatttaattattttgcattttttcttttattgagtgtatagctatgataaaattatattagaaaaacagttaagaggatgtgattatgatgtgaattgaagaaagcgagataatatttaaaaaatatatagaaaaggagaaaaactatgaaaaaactaattaaaattatcgctacgttatcattgactttgtctttaatgccgactgttgaagtatttgctatggatagtattaacgaaaatatctcattagaagaaatattaagtaaagaagcaacgcctgaagaagtaaatagagtaggtcaagaaatagctgatgaaaagaacaagacgtcttctaatgctagaatgagtggagaaatatggacacttactagttctaaaaggttgtatagtagaagagcaataaaaggtcaatatagaactcatgtagattcaaatactgatgaaacttattcagtaacagtaagtttagatggttcttttaaatatatgcctacagctaatacagaaatatcacttactggtgggattagtgcaactaaaagtaaaacatttaaaggaccacaaaaagaatatctatcaaacggaaatcttgccactcatagattatttataggtcttacttttggtgaaatatatcaatacacatatagagtaactgataaatatactggaacatatttgagaaccgtaacatcaaaaaacgttgttggtgctgaaacttttggattaaatcagttaatgcgtcttaattctaatggctctattgttgtaggaaatattgataacaatgctgtaaaaacatattcatctcttgcagcttataaaacagctgtacagaaatattcttatacatgtaaaaatgttatatatttctagaaggtttaatgtgtcgcttatatgaagaaaaaaataatgatttttagtgttgtattcatttgtatagtatctattgcttttatcttttttacaagaaaagatgatgatatatatactccaactatcagggatatcgacaacttcataattgaaaataacaatagatatatcatactttatagtagtgaagacaataaatattatttaggtaaagtatcaacttatgcactagatgataacttatactatttaggagatactgcttgtaattttaaaaaagtgaataataatcttattgttataagtaatagcgagcaagttgtttattctagtggagattacgattttttacctgataaggtatatgatatcaaaacaatggggaatttgatgatatcttatgatagtaaaaatcatgatatgcaaatacttaaaagagaatctgaggcaaaatgtattttaaaatttaaatactataataattttattcctgttgatttaattgaaacataggaaatataaataaaattgtataagtgtaaagatactgatatatatcagtaactttatttttttgtaaagaaataatttaatttcaattttataggatataagtgtcaaaaagtgtcaatttcagatttgatgtgttataatttgggaacataaatatgaataatgttgataaagtaatgcttaaaaaaatagtaattttaccattagaagttttgaatattactacacatgaaataacgtaataaatagggataaaatcaatattttgaagatgtcactggcatacattttggcatacaaaatgaaatcaatagagataaaattaatgtataaacacttgttttagatatctaataacttagaaaaacacataaaaatgtgtatatatataatgaatgaattgaaatggatttagattatgtagaagcattagaatatggtttaccaccaacaggtggaatgggtatgggaattgatagattagttatgttattaactggtcaagaatctattcaagaggtaattctctttccacaaatgaaacctagaaataagtaattgaacctcatacaggttacagacaacaggcatacaatcgaaatttgtgtgatgtaatcagcactatttgcatcatataagtatcatacagatgatagataaaaatcgttgatttttccgtgaaaatacgattttttccataaattccgtgaaaaggtcgtgaaaaatggcataaaatataagtatatataagaacatgatcatttactggtcatgttttttaatgaaaattgtgaattgattatagattgaaacgattctactcggtgtaattattagaaaattaaaaaaagtagaaaacttgataggttaattattgttgtaattttatatagtgtatgaaataattgatttaacagtaacatgaactaacaaataaatcagaatctatggaagatattcaaattcaggtatcatgagtacgcatcagagtttgagcaaaatataaatttgaaataaaaatatatttataatttctttattctagtattaaaataaattgtattctatagaaataattgttgaagattttttgttaaataaatatactacaaacatacaagaatataaaaaggtccaacttgataaaaatcttttgaaatttttacacatattaataaaaaaatgatatactatatataaggtgattattatggataaagaagaaataagaaaaaaattaaaaaacaattttttgaaaagattaatttttagaattgatttttcaggtatgatggatgcagatgttgaaaagtttatacagaatattagaccaagaattttagaaagtggatatactgtgttgaaagaagaatttgggaataatgttaacgttaatgtattatcgcccaaaaatattgaaacgagtaatgaaataactaaaatatatgtatttaattctaaacatggtaaggaactaaaaatatctaaatcatttgttatttttgaaattgatattgaaagaaataaaacgttattttctagttatacaccactaatttcttatattatcgaagaactaaaagcaatggaatttgttcaatttgatagaattgggttaagaaagataaacgtatgtatattgttaaataaaagaaaacttaatcaatatttcaaagataaagtattatgtaggtttgatgatgaatcatcagtgactcaagtagctgatgaactatatgctgaagattacaaggtgaattttaatagacgttttcaagaaggaacaatattagaagaaggcaatactaaagtagtatatcaaattcttttagatattgattcttatatggatgataatgaaaaagtagatcaaaatattagagaaaatgattcgtctgaaattctaaaaaaattaaatgatattatttatgacatttatatagaatcattagattcgttatttattgataagttagtaattaatagctttgatgatgatgaaatacgaggggtgacaaaaaatgtataaaattaattccttgaattttgttccgattattgaaaaaagagaaagaaaattagaaagtgataaaacttctattcatacattcgttgctaagactgaaaaaggccccatgaaatctgtttataatcgtgttaatcgtgctcaatatagcagaattatttatggggacaagaaagatgaagagtaagttaccatacattgtaaataaaaatttgcaagttgaaatttgtactataggatataaagcaataggagagtcaattgtattatttgtcaaagtagactcaaatattgttttttctgcagttatagattcttattgttataatggagtaaataaaaccatagaaattttaaagaataacaatgtagagacaattgattatttttgttggactcatccagatgatgatcattcaaaaggtttagatgagttatttaatgattttattgatgaaaatacattaataaatattccagaaaatgcagagataaatagtgaaaaatgttcggatagtacaatagatatttttaatatgttgaaagctaatttgggaaaaagaggtgcaaaaagtggcaaacgttataaagtctacacggtttctgattttaaagaattattagcaaatgaggatgatttagaaattctttataatgaaaaacaatactgccttgaaattaaatcaattgcaccaaattcacaattaattagagatgattttttgttagatagattttgtaaaaataaacattctatagcttttataatttattttggaaataatgtctttttgtttacaggggatatagagaatccaacaataaaacagtttaagaggaaaaatataccttcaagtttaagttatttgaaaattccacatcatggttcaaaaggttcagattctttactcgaatatatagattacattgatgtgtcttgtgtaacatcatatgtgaggggaagcagtagaaatccagaaaaagaagttttggacagatatcaagaagtgtcaaaaaaagtgtactcttcttataatattgaaggtgaaaataatgatgattttggaataatatatacaacttttgatatattaaatgaattacatacaactaaattggaaggaaatgcatgtttattataaagaattaaatgttttattactaattgatgtaatacatatgatcatcgcttgaaatttcaaatgagatgtatttggacaaaaaaacgaagttaaatttgaaattaacttaaatatatctttaaaattataaataagaagttattcttatcccctgagaaaacaaaaaaatcaaatacaatttcacatggatagcatataagcaatatacaacctcatataaatgtcgtgaaaaagtcgtgaaaacgcaaatcaaaaagcattaatcagaaaaacatgcgataaaatcaatgctttttcaaattaaggtgatagaaaagggaataccgcaaattagtcgtgaaaaaagcagaattcttataagagttctgctttttttatataaaaatagtgagtgtttgatacaaagtgtatctttttttattatctccattcatatctatttaatttctaaataccttgaccggtttcattctctttatcataaagacaatgagtaagatattaacaagtaaaatagctgtttcaactaaaaagatatattgataaaagtcttgaataaacagattcgtcaagataaacacaataaacaatccaataatattcatcaatatcaattcaaaacatacaagcgcagaaatattaagtgtagttaatcccatgcatttaagtagtgataattctttttctctactttgaatatatgaacgatacataatcataagaataatgcatcctaaaacgagaattccaataataagattctgttgaatatcatgcaatctttctacatattttgctatgttgttaaattgatggtatgtgataactttataacctgatttttctaaagtctcttttgtttggacataattctgataggaattacaaaacacgacatatccattgacttgctgaggattcaattgattttcaattaattcttgtggcatataaataaacttcttagaatcaatcagctcacttgtaactccctgcaacaatattcctttataaaaaagagaaacttcttttccgtttgatatattcaaaaaagacatttcgtttgttggtgcgacaagatacttaatactcgtatatagcgagttactaaaataaaatccatcattgtctgtaacatccattctaaaccaaagcttacttgcaatattttcctcaggatagtatggaataactggatacgaatcatttaatataaacaatgaaacatcataaaatggataagatgacatgattgtatttgatgataatttatccttcttgataccttcaacatacatccagccaggatcctttgaagaaatcatattcaggttatcctgaatagattgattcgttaaatagactgttccaaaacaaaacagcagaataactaaatgagctaatatcaataagtatttcatctttcttgaaaaatgaaattgtcttttcatataaaaacgatatgtctgccatgaaatatgtgatgaatttttttgatgaataacactttcttgatttttggcatgagattcttttattttatgaatattcccatcctttatttcaataatttcatcacaatagtcataagctatctgattatgacttgtcacaataacagttttttcttggctgatttccttaagaacctgaaatattgaaatggcatttttctcgtccaatgcactggttggttcatccaatattaagattggggcatctttgataagagcgcatgctatggctaatcgctgtttttgtccaccagaaagtgtatagagtgccttatccagcaagacatcaagatgaaccttatttaaatattctctggcatcttcttcattcaatgatttgtttgacaaagctgcataatagcataaattttcatacacattgaaatgctcatataacatatagttttgaaaaacaaaagcgatattatatcttctaaaaagtgttttcttatgcatagaaaatgatgttatatctatatcactaatccaatattttgcatttttttctgagtagttaataagccctatctgataaagaagagttgtcttgccacaaccactttcaccagctatcaatgtcaaacaatgatctttgatttctatattttgatgaacaaacaatggtctatcaaagacaatattgatatcttcaagtttaatcatttgacaacacctcccataacattggtacaactagctgtataatgaatgcaactgtaaagattaccaacaccgaattaaagtctatgatatatggctgataataaacatatgcagatatgagtacgactacccaaagcatcatgtaagaaattatcgctagcaaaagagcattaatgaaatatttttgaatcttaatctttaatatatccttcttttgaagatagcctatgcttcttaaccattggttgaaatttttttcatcctttcccttgataaaatgaataattccataaatgaatgttacaaaaataaccgaagctatacttataaaataaagtgttgtttttgtattcttcatagattcacctatcgattgataatcattatatctccaatcaactgtcagtccttttgactccaattcatcaacaaccttttcaatgtgttcagttttatcaacctcaacagtgtatgcatttggccgccatggcgtatagacttcaaccaagtcagcatcttccaatgaacgagtttccacatatccttctgcactatccttcaaatagacagattttccttttgaaggcatacacgattgggctatcttttctagcagttgatcattcatatagaaagttgcatcctgttctgtcagtgctccttctaaatcatgttcaaccacacctaatataggtaaaactaattctttagaagtacattcaatataatttgccggaagaaaatcatcgtcgcttgtttctataccacttggagtacttccggaaaattgcatctttccagaaacatcatacataggtattgcaatattcattttaatagatgcgtcttttaaattatctatcgttaagccacatctgatcataaattgcttcgttaaataaatgccatcttcttcatgatttcgaaaggattcagttatatatttctctttttcttgattattcattttatcaataaataatgtaaaaaaattcgaattgctttccttcaattctttatcaatagtattttgataatcataaatgatttgattatctttaataatttgcatggatggataactttctgatagcctctcgtcaatataactatgcaaaacaatttttggagacattgatgcaacgtttggtatattttgaatcatagcgagttctgatgatgttataggaaaatatgttgcattttccatatctccattaaagcctggactacttggatctaatcctttgtaaaccaatatgtttctgttttcaagtgtttctaagtttgtttcaaaagatcgaaagaatccgttgtctacattgattgaaaacgcacaaagcgttatagcaaatgacatcaacaaaagtgtgatagtttccttgaagatatgatgttttttcattttcataaagatattaagccagtttttctttaatgagatctctctatttttaattttagaaattttattattatctaataatgtactatcttgtaatattaaatcatgattgtctattgtatatagcatatctgcattatcaataatatatgaatcatgtgtcgctataataatatgacaatctttttttagattctgaagtaattctaataattttattttgtattcaatattcaatgaagcagttggctcatccatcaaaataatctgtggtttcattatggcaatagcaacaaaagaagcccttagtttttcccctcctgaaagctgagcaggatataaatctttttccttttccagacccatttgttgtattaggaaatccaaattcgagcattgaccatatatactttctagaaggctccaataatcttttatcttaagattgacattaaagctacattcttgctgcatataatagagattttttaaatacttcatctgaacttcattatgaactatgctttgaccattatattccatatcaaaacaaactccatatctcaaagataacaaatcaagcaaagttgttttgccactaccactttcaccttttatcacagtgatatgatgactataaaatgaaaaagacacttcttcaaaaattgtaagttgactataactaaaactcaaatcttgaacttttatcatctatatcaaatcctttctataaagcatatcaacaaagatatgattttcattgaacacttaattttttgttagagctattattaatactccatgtataccctaatctgtagagaaaataataaacttcttaaataacttcatgtaaatacttccttccaattaaaagaagtattatctttggattacataaatttaatatttcattatcttcctttttagggtgtaatcgctttctctaattatattgtattgtggtttattataactgtcaataaatatattattttttacgacttattttatatttattactattgtgatataatctataaaaggaacgaggttggtatggctaaatattctaattatttatttaaacttgatttattgattttaagtgtcttaaaacataaagatatgtatggttacgaactatctaaagtgatttctgaacaaacaaatggttatgttgtacctaaacatggaactatgtatcctgttatttataaacttattgaggatggttatatcactagtcatacagttgttgtaaaaaacaaagcgcgcgtttactatcatttagaagataaaggaaaagaatatcttcaacagcttgtggaagattatgataatcttgtactacaaattaacaatattgttcatggaggggaaaacaatgacagcaaataaaagatattatagggatgtaaaaaagctttttcctgtatatttaaaaaaagaaaaattgtatcttaaccagcttaaagaacaaattgatgaatatgaagatacatcgtatgaagaattagttgatatttttggcaatcctatcgatatagtgaaagcatattatgatacaatcaatagcaaatatttattgaagagaatgaatttaaaaagaattgtgacaatgacatgtatattagtgttactattaagtaccctttatttagggtatagaacatactcattacacgaagcaattaataatttcgagactggcattcctgcagaaattgaagaaacaatagaagtagtagaataataaaaaaattaattttgtctattcttaatctaaatcttctatgttttctatcatggtccttgactactttaattttaaatcgattgatccatccatctcttacactgctttttagctattccttataaaggtttggttttcctctgtaacagaatttgtagatcttcatgttatagaggataaacatatcggttgataaataaattctatcttccaaaagtatcattttttgattttctatattattatataaacatcattaatttggtaatgataattatttatatagaaaaatatgatattgagactgattgttaatcaatatgacaaataacaactgacatgaggagttgtgttgttttcttgtctctataagaaataattcagattataaaattaatatttaaatacagtatagaacacttatgttgattcatatgagttgatataggtgttttttaatttttaaaatattatatataagaaagtttattgataaaaaggaatatatataaaatgaatgttatagtttatatattgtgtattttgtgacttaaaaatgtttcttgtgagtaaaaaattgtttggtgatagttaaatgtgttacaattaaaaaaatatataatttgatataagcaaaataaaataatagggggcatattatgctagagattaaagatattcatatttcttttgatagaaatatattcaataatacacaaattcaattctattcctcatctattcatgcgattgtagggaaaagtggatcaggaaaaacaacatttttaaaaagtattatacatgattcatcttttgcacaatcaaaaatgtattataatcatgaagaaattcatcaaaaagatgattttgtaagaaatcatgttgcttatgttgatcagttaggaagttattttccaaatatgtcaattaagcaacattttcagttttatgctgaaatgaagaaagaaaaaatagatgtacaaaaaattaatcgttgtctagaaaaagttaatttaaataatgtgaacattaataaatcaccaagtgttttatctattggtgaaagaaaaagaatgttgattgctcttgctatattttgtgataaggatattattattttagatgagccaactgcttcacttgataaaaagaatataagtttattaaaaaagatattggtttcattagaagataaaacaatcatattaacaacacatacacctgaaatattagaaatatgtaatgttatttataagatagaaaatcaagaatttcattgtcaaaagaatgacattgatgaaacacaggaaactgaaataaaattaagaaataattatcagttttcatcaattaagtattttagatataaaagtttaattcaatggatacagtatatagggattatagttatttctttatttatccttattcaatcatctttaatcgttaattcttttttaaaaaccacaaatgttagttctcaagcaataaatcaatcttcaaaagaaatgttatttataagaagtagagagggagaaatagtttgggactataatccttcatcaggatttcatgattcaaaaccttttgatgaagataatttaagcaaaattaaacatatggaaggtgtaaaggagattaagaaatttgaggaattgaccttattcaatcctcatagtgaggaatcacaaactttgcaaattgttaataagaatggaactacaaaaaattatactgtaaatgtgagtgagggttatgacctaagagtatatccatattatgagagtaatgattttaatgatcacgataatggagtttatataagctatgggttatcacaagtttataacattcatgaaggagatacaattaaggcgaagttttatattcctaaagatcaatatataaaaggtagtgggctagattatcgaagtgtaacatatacacttagagaattagaatttaaggtcagtaagattattaaaaaggatgacggatatgaaaccggagtaactgacttgattatttatattccctatgaaaatttaatgaatatcatgtctcatattgacaagaaggaagaaatcatttctagctattacattgataatgttctctctaaacaagtttcagcacagccatataccatgaatgagtatgtattatttgtagatgaggactatgttgcagatattaataattctattttagagatggatgatgaatatgatacattttctagatatctgggtcagcttgaatatgataaaatgatgaaagaagcatttcaaacaaagttgttaagttttgctgcgatttgtagtgtgggattaatagcccttcttacaacacaatactttttaatgaaatctagaaagaaagagtttcaaatattggaagatagtggggtacaagataaggatactaagaaaagtcttttgttagaaaatagcatatattttatcatcatatcaatagctgtttttttatggttatatattgatagagaacgatatgcatatattattgctcaatatttagcagttttaggaataagttttatattattgcttttaatgcatgcagtttctcaccttgtattaaagaaaaaatagaaatagattatacaataaaaaaatctatgaagggaacgaaataaacgatgctagaaataaaaaatatttcactatcatttgataaagaacttattaagaatggccaattatatatttatgataatcaaattactgttctttctggaccaagtggttcaggtaaaagtagtttattatatgatattgcttttttatctcatcaaagtcaaatgaattatatctttgatggaaaggatgttcaaacattatcaaaagatgagataagagatattcaacgaaataaaattgcctttgtctttcaaaatattccattattcaatagtatgactctcatggaaaatattcgtttttatgctagtttaacacaagaaacattttctgaggaaaaggcacgtcagtatttaacagacttggagttattcttagatgatcatacagatattgaacatttatctggtggagaaagacaacgtttagcaattatttgtgctttaatgaaagatacaccttatatattcatggatgaaccaacagcttatcttgatgaagataatagggaagaatttataaaaatcttagacttattaaaaaatcgttatcataaaacaattctcatcgcttcacatgatagtttattatttgaagcgtgtgataatctttatgaagttaaggataaacaaattcaatgtataaaaagctcagatttagttaatgctcatccatcattacagcataaagataaatatgtattcaaaggacttccttatttttataaatgtgaatttcgtaaaaatcaatggaaacataaaacttttcaactgtttttaacattcattttatttattagtacattttgtgggatgtatttacaatattatcaaaagcaacttgataaaaacgtagaagaatatcgaagttcacaattggtaataaggatggacaagaaaataagtggaccagtgctcagagaaatggaaggactgccaaatatcaaagctgtcaaaagaataactccacttatgagtgataatcaatatttgatatgtccctatttagaaaatgatttttttactcgtggtatcaaacaatcattgaaaaatgaaaatcatgcaggtgtttatatcaattatgaaacatacagagatacaaaagacaaagcaatagatgttatagttgagggaaaaaatataaccattcaaccagattatcaattagataaagcatttgctgattataaattaaaatcaaatcttgcaagagtcatttatcttccttatgaagattatttaaagctctataattataaagataactcacctatacaatcatcatatgcattaatatcattagatgatgcaaatgattaccttgaaacactagaggttcttattgataaatatgaagatatatcattagaaaatcaaatagaaataacaactttattaaatataaaaaataccacagaacaatttacaaattcaataatgatatttatatgtgcaatcgttgttctttcaataattttacttaaaattattgattactatcacctaagattttctcaagtcttattagaagttaatggtatctcaaacaaggatatgagaaaacaatacatcataaaagaattatcacaatatggaataccaattatcattgcatatatagctttactcataagttatggaatattgaagatgttaaatattcaaatgatgatgtatctatttatggtattaatctcttgtgcatttgttatattcatattatctattatcatttatatgattatgaataagtttttatctacaactaaaatattaaagatgctttaatctatagtgactaccctaataacctcataaaatgctaaattttaaaattaatttatgatataataaatgaagaaataaattttaattttgttgaaataacagattatatttatttcttatttatttaatgggagagttaattatgaatgttgttattgtagatgatgatttagaatttgcaaaattaatagaaaaagatgtttctcagtttttttctcgtttatatgattttgtatctatagatattattaatgatgattttaaaagaatagaggattattcatctattgatcttgtttttttagatattgatttaaaaaaagaatataatggtataaatataggacaatttatccaagattattttccaaaagcaataatagtttttgtttcaatacatgaagaacttgttttttcagcattatctattcgattttttcaatttatacgtaaagcacaatatcaaacagatattgttaaagtattaaaacaagtaaaaaaatatatggatgaaaatattaagaaaattttgattaaagttgatggaagaacgcatgttattaagtttagtgaaataatttatttgatggttataggacatgatcttattattaaaactattgataatgaattgactattcatagttcattgatgaaatttatgaatcaggtagattataaagaacttgttcaaatagaaagaaatttagtaattaatttaaattatgctaaggaagttatgagaataaaagttgttatgtatgatgatgtagaacataatgttggaagaaaatatcaaagtaatcttatagaaaaatatgaggagtttttattaaaatgattttgtttgacactattatgacaattatagaagattttattttatcttattttagttttaagattcttgaaattaatgataaaaaaggtttaatatttttaaatgcgattatttgtttcattgagacattcatatttaataattatataacaaacaattttctattattagctttattaattatgacgaactttgtaataatctattttgtaaagaaggaattgaatttatactactttattattccatcaatactgattgctcttttacttttctctaacactatatcgttagtttttgtatcattgtttcttaatattagtccaaaagatataggattaacaaatacagcagtcataatcctatctttgatttcaagagtattttatttcatatttggctttatgttttattatgtggagaaaagattaaaacagtatagaaaagttactttaaaaaaagattattggattgtattttgtatttttacgtttacgtttttaggggcttatactatcttgtatgaagctattttttatcaaacaattggtagtaagacaatttataatctgttatttctctttatcgtcttaattatatccttctttatattatattatcgtatgcaaatagatcactataatcatatgttaataagtaatgaattgttgaaaagtcattatgctgaagaattatataagaaaacaaataaattatcatatcaaatacttcaagaaaaacaccatatgttttatgtgatgattaaaattagaaatttacttgaaaatcataatttagatgaaacttctttatttgttaatgaagtgattgaaaattatcaagcatatgaattaactcaaacatcaaatgtgcctgcttttgattacaatatattaaattatataaatctattaaaaaaagatggctacaatattacaacaatcataactgtagaaaataataagatgctagaggatatccatattattaatatcataaaagaatgtatagaaacaattgtgcaatatacaatcaatgaaagacaatttgatttacaattacatgatagtgattcctatttaattttaaaaataacaacgcataaacaaaatagtcaactacctttattatcaataaaaaaatctgatcttgtaagaaaagctgatattataaccaatgaaaataatgaagttgaattaagagtattgttttttactaagtaattattatttgaattttataagaaaaatataacaagtaaatcaaatgtttttaataattattttaatccatcaaagacacttaagattaatagtaatcaattggggaaaaagtttgggtaactcataataatcgagaatatgttgattatgaagtaatataaatattttagtttaaatttgataaattgttagaccatatcaaaaacatgtcataaatcaaaaagaatttagagatattataaaggaacactatcagcaacaggcacaaaatttgattagttcaaaaggaaataatgtattaacaaaaattagagtaaatggtgataaattattttatagaatttcaaagaatgaatttgctgtcattgattcttctggtaaaataaaaatatactttaaaccaacaggaggaattgattacttttataatcaataattatttgtgaaagaaattagtccttttttgacttattaagtttgttagagtatctatatattttataatagataatatgtgataatgggttattaaaagtacaatacaagaagttttttaacaaggagaatttttgatgaaatatatatgtccaatatgtggttatgataaattgttagaaccaccatatgatgaatataataacccatcatacgaaatatgtccatgttgtggatttgaatatgggtttgatgatcaagatcaaaattttgattttatagcatatagggaaaattggttattaagtggtgctaaatggtttctgcctcaagaaaaacctgataattgggatttgagtgcacaattaaaaaatttaactagttataataaataaatattaactatatcaaatttagttatgactcatggtatgattccagaaatcttgttcatatatctgtacgattatacaacagaacaaaaaatgcaacttataatggttatattgctaaaatattttatccaaattgttctgagaaattcagttatataacatggaatttagctaagctaaagacaatttttatattagttaataatgcaattaatatttttaaatagtgattgtgcaggtgctttattttcagcacctgactactattatacgagctacttgttataaaataaaattaaaggaacctctaaattaagttataattagtttgaagacaaatttaacttaaggagattccatatatgaattataaccaattagaaaagataaagcaattaacagatcaaacattaattattggaacagatgtttcaaagaattttcatgtttctagagcacaggattttagaggtattgaatttggaaaatcaatcaagttcaacaatgatattattggtattcttgaatttgaaaaatggttcaagcaattaatggaaggtaatggtaaaacagaagttgtgattggtatggaaccaactggacactactggataccattagcgagatgtttaaagaatatgggctataaggttgtaacagtcaatccggcagctactaaaaaggctaaggaactagatgacaacaatcagtcaaaaacagaccatagggacgcaagagttattgcacaattagttaaagatggcagatatacagagccaaatcttttggatggtttttatgaagaattaagagaaacaactaagattaaaaagattttaactggtgatatggttagaaccaaaaatcagattacaaactggtttgatagatatttttcagaatatgcgaaagtatttaaaaaatgggataagaagacattactatggataatcaagaaatatagatttccaatacttattgccaaacttgatccagaagaagtttatatagagataaaaaaggacaatgccaagggtataggaagaaaaaagattaaagaaattattgaagcggcaaagacatctataggaattacagaaggattaaagtctgcttctatagaatttgattatcttatcagtaaatatgaaaaattcacagatgatttgataaatcttgatatttatattcaggaactcattcaagattgtgatgaaacaagtagagtcatggaaataaatggattaggtttaaatacagcagtaggactcatcagtgaattaggtgcaatcagtcaatataagtcaccaaaacagttgagcaagatggcaggtttatcattagtggaagatagctcaggaaagaaaaaagggaaaagagtgataagcaagcgaggaaggtccaatcttagaaagttattgtatcaatgcattgtctctatgcttagtcacaatgaagaatttcaggaattatatgcttattacacaaaaagaaatatgaatccgctaacaggaaaagaagctatcgttgcattaatgaataagttattaagaattatacacacacttataacaaagaaagtgaagtatgatcccaaaaaaatgttaaatgatatcaggcgacaagaaggatactttgtagttgcttaatatataaatgtttaagtatttagaaaaatacttctataacatgcatgacaccctctgcatgaaatagcacaatttcatatgacaagaatggttaccctggtgcatctcctttcggacttgatcctgaatacgagcttaagggaactcacttataaatatgctggacgaaagtagtttagggcaagaccctgttagtgagaggtatagcttttatgattggtatgagtttagaccaaattgtcaaaaaaaacaacgtgttgtcatattttttaagtcggccaaaaacaggggaattaatcaataaaagcttaaaaacgtttattgaatatttgttggttgaaatcaaaactgttttaaatattaatgatttagttaaaaaggaaatttttgatgtttaaatatattaaaatttagaaaaaatttacttgatttagagagatataaatgaaagtagtaagaattggttaaaaaaaatcacttcatatggtaataatctttatttcttagaagatcgatgggaaaatggaaacaacaattttattatctccatatgggaaaatggttctagaaaacagttgcagaaggtgccatgctacagtcaaaacttctaccaaatatcagatgatggaaagtattcattactgcctactgtagatcgttataaacatggagagatacatatatacgattttcatacattagaggaaattgactgtataaaattttggcaggaaggattttatgcaattatagcatattttatggaatatgataaaaatgattatattgtgtttgaagcaaatccaagtccagatactgatgaaatatggcatactcatatctattcaattaaagataaaaaaataattaagtcattcgattataggattattattgaatcagttaaaggcagaaacttattaatcattcaaacaccaagaaaaagaaaaataatttttcatagctattaaaatagaaaagaaacaaaaattagtgagatagaggatttagaaatttatttttgaacatgatttaacgatatgaaagtagtgattaaatgaatagaaatagtggatttcgtaaaaataatatcataaataagtatttattatatcaatattatcagtaataattgcattatgcttaacaacatcttttctatatgatactcataattatatatagagctaatgatatattgaatgtgttttgcttaagacaaatgattactcattgttaagtgtttctgctgctgataacaatgatggaaaatatagtataagaaaatctacacatatggttaacagaaataataatagagatttttatgaacagtacatgatgaagaagaatgtcactatagatgaatattttaagattattgaaaagattgttggtaaaataaaagaatataagcctttttctaacaatgtttattatttgaaattagaacagggaggaatatttataagttgtcgttatcttcacaagtacaaataagtatgacttatgattctggacacttatgattgtttcaatcagttgagcaatagcttggataatagttaatgccacttctctcctttcgatgaaaggagagattttttttcataaagaatgtttggtcaatgtggtatagatgttcacaaaaaatatcattgaggtcattattggtattactgataagaaaaactcaaataactgaatacatctaagaaacatttaatatcttgaattctaatttacaacgacttaaacaatgatttgttgattataaatgttttgatttgttatgattattttaagatatatgataaaatgaaaatgacaggaggggagattaaaatatggaagaaaaagtatttgctaagggatattgttttgcaaagatatttatcttttttgtcattggatgtttgataggaacttattatgaagaaatattgtggtacgtaagatttggtgaatgggttgatcgacaaggtatgatttatggtccatttagcccaatttatggtgttggagtagctatttttgttgttatattaggaaaacataatgatcaaagaagtattttaaaaacatggatctacgcagctcttattggtggaacaacagaatttataacaagttggattgcggatgtttgttttggtgttattttttgggattattctaagatgtttttaaatattgctgggagaaccacaattccatttatgattggttggggaattgcaggaacagttttaatgaaagttatttatccttttgtatcaaagtggctagaaaaaataccttataaaattgctcatcctatttatatggctgctgttgtatttatcacactagacttaattattacatatagcgcttttggaagaatggcattaagagatcaaggggttaaaccatttactttcattggtgaattatatgataaaatttatgatgatgagtttatgtatcataagtttccagttatgagtcctgaagttaagtaagatcatctataaaaataaaaggaggaaatataatgaaattacatattaaaggaaaagttatgagtatacataataaaatggatattttagatgagaatgaaaatgtaagatatcgtgtagtaagtaaagcattatctattcatgataagacacatattgaagatgctcaaggtaatgaaatagcatatttacatgcaaaggctatttcgattcatcaagttcattatattgaaatggctaatggagaaaagtttgaaatgaagattaaactaggacatccatttaaaaatcaatttgtagttgatgggttaggatggaaaatgttaggagaatttgctgcacatgattataagattgttgatgaaaatgatcatgttttagcaactgcgcatcgtaaatggttttcaatgcatgatatttattatttagatattttagaagatagtcaggcagaaaaaattattgcttgttatattgtattggaacatatattaagaaatcaagagtcagcagcaacttccaattcaagcaacaaccaataaagcatatttaagttgagaaaatataaatatgacattctattataaattttcttgtgttcataacataaatttgagtaatttaaaaagggataactaaataattatttttgatatcaatttcaataaaattatatggagttttaatcactccatataattttattataaatgcaacttataaatacatagatgttacatttggtttcttgatatattaatgttaataagatacgataaatgtgcaaggaggaagtcatcatgaatatttcagaaaaaatagtcatgctaagaaaagaagcacatatgacacaagaagaacttgcccaagcttgtcatgtttctagacaagcagtcagtcgatgggaaaaaggagaaacaaaaccagatattgaatctgcagtattgctagcacaaacatttcatatgagtatagatgatttgttgttatctccgaaattacatttacctaagaaaatattattaacatataagcaaatcataatagttgtatgtagcattctgttgttaggttgttttataggttatttgttttatgaaaattcaaaagtcgatatgacaaaatttctcttatcagaagcaaggatagatttagtaaagagtgatataagtaatacttgttataaaataactgtaacacctttaaattataataaaaatatttcaatgaaactatctattaaaccagattataaaaatgaaactgatatagtattaatgcagcctgaagtaaatgaattaaattttacaactacatattattttgatatggattttatttatgatatttatcttatccaaagtgatggaaaacaaacgataaagattcctttatggaattacaataaaccattttttattcaggaatacagttatttatcagaatttaatattttagatgaatttaagtagtatcaacaaacataaaggatattcaatgacagaataagtaaagattaactaagaaaattaaaacaaataataaaagggagataaagtgtttatgaaaaaaataatgtctttaatgatatgtatactcatgttattaacgggatgtgtagataatgataaaaaagaaaaagagccaatagctccagtcaaaaatacaacaaatattataagttatatcagtgaaacgcctttaactgaggaagttttaaaggatgttacagatgctcattcggtatttgaataccatttagatgagagttacaaaacagcaacaattgaagtctgggagaaaaatgatggatgggaaaaaatagtatcaactactgattctattacatctcaaggagaaattgctattgtgtcaggtcaagattcgtatcatatttatatgattgcttcaagagacgagtacaatataactgaatataagtgttctgattattttcgtaaatctatgaatcataataaaatacaaagagcgaatccattagaagaaaaagaaataaaatcaggaaaagaaattgcactatggaaagtgttaggatataaagaagaaaataataatcctaaagcatcagattttaatgatgttgattgtgattatgggcttaaaataacagttacatttaataataaagatattgataagaattaaaatttatttagaagttgagattggataatcttgacttttttattttatgtaaaacaatgaatttttaaatggataaattgtatatattagataaaaagagtacaatgatggcataattgaaatatggagaagaaatattataaaggcaaataaatatttcaaaatgatcaagattataatcacatgattaaaaaatagatatgcttgatgtatatctatgaaagaaatattttagcttagggataaggattaaaaaatatgataagaaagttagaagaaaaagatattgatagaattatgaatatttggtttgaaagtaatagaaaagcacatgattttattcctaaaaaatactggttagaacattatgaaatggtcaaaaaaatgatacctcagtcagaagtctatgtttctattgataatcaatcacaagctattcaaggatttattggaattgatgatgaatatattatggggatttttgtagatattcaaaaacaatctcatggaatagggagtcaattgttgaagtttgttaaatctagaaaaaagaatttaactttaaatgtctatcaaaagaataaaagagctattcagttttatttgaaaaatggttttataattgttgaagatggttttgatgaggatacgatggaaaaagaatataccatggtctataaggataaataaatatgaatctcaaggaaaaagctcagcacttaaaacaaaatataacagcattaactattgctatgaaaaagaaagaaacaccaatttatgcaaaagtaatagtaggtataacgactggttatgctttgtcaccaattgacctcatacctgattttatacctattttaggttatatagatgatatgatcattttgccattattgatttggttatcgattcaattaatacctttagatgttatggaagaatcaaaaaaagaagctaaagatttatgggaaaatggatatcctaaaaaatggtattatggtattcctatagtattcatatggatatttattatctttatgattataaaacaattcatataatgaaataatttgtcagtaaaaggaataatatcataataaaatgaatatgttcatcttgtattcaaaaatattctatttaatagtataatatgtagataagagaaggaggcaatacaaatgcttcaaataaaaaatatacacaaagaatataaaacagggaatttaattcaaaaggcactggatggagtgagtttgaatttacgtgataatgaatttgttgccattttaggacctagtggttcagggaaaacaacattattaaatattattggcggtcttgatcgttatgatcagggtgatttaattattaatgggatttcaacaaagaaatataaagatcgtgattgggattcttatcgtaatcatacgattggatttgtttttcaaagttataacttgattcctcatcaaacagttcttgctaatgttgaattagctttaacaatttctggtatttctaaagcagaaagaaaacaaagagctgaaaaagccttagaacaagtaggacttggaaatcaaggtcataaaaaaccaaatcaaatgtcaggtggacaaatgcaacgtgtcgccattgctcgtgccttagtcaatgatccagatattttattagctgatgagccaacaggagcattggatagtgataccagcgttcaagttatggatttattaaaagaagttgcaaaagatcgattggttgttatggtaacgcataatccagaattagctcaagaatatgcaacacgtattgttgaattacgtgatggaacaattcgtagtgattctgatccttttgaagtgagtgataaagaattagaaaaacctaaacatcaaaatatgggtaaatcttctatgtctttattaacatctttatctttaagttttaataacttaaaaacaaaaaaagcccgtactattttaacttcttttgcaggctcaattgggattattggaattgctttgattttatcattatctaatggtgttaatcaatatattcaatcaattgaagaagaaacattatcagaatatccattacaaattcaaagcactggttttgatattacttcaatgatgacagatgtacatccaggaccaggaacagaagaaaaagatgaatcaaaaatctatgtttctcaaatgattaccaatatgttttctaagattggttctaatgatttaacatccttaaaagaatatcttgatagtggaaaaagtgatattaaaaagaatacaaattcaattgaatataattataatgttgcgccacagatttatagtccaaatactaaaaatattagacaagttcatcctgataaatcatttgctgctttaggattaggttcatcatctaattctaatagtatgatgtcagccatgatgagtacagatgttttttatcagatgcctaatcatccaaatctttatcaagatcaatatgatattaaagctggaaagtggccagaaagttataatgaatgtgttttggttttaacaaagaacggaaatattaatgactttatgttatatacattgggattacgtgatttttcagaacttgataaaatggttgaacaattctcaaaagaggaagaagtcaaagttcctgataatgctggaaaatattcatatgatgatattttaggaaaagaatttaaattagttaatgcaactgattattatcaatatgataaaaaatacaatgtttataaagataaaactgatgatacaaaatatatgcaaaagcttattgaaaatggtgaaaatattaaaattgtagggattgtccaaccagctgaaacagcaacagcaacaatgttaagatctgggattggttatcctgcttcacttacaacacatgtgattgaaaaagctcaagcaagtgatattgtcaaaaaacaattagaagattctaatgttgatgtttttactggaaagaagttcagtgataaagaaagtaataaaatggatatgaattctttatttactgttgatgctaatatgatgaaaaaggcatttacttttgatcaaagtaagctttctatggatatgggtagtttggatttaagtcagattaagatagatccatcttcattaccagctattgatatgacaaatatctttaaagatatgaaggtgaatatttctaaggatcaattagagtcattaagtcaaaaaattatggctcaattccagcaatatgcaatagataatggaatgacggatccaacaaagatgagagattatttcttagcttatctacaaacagaaaatgctcaaaaactcattcaaagtgaaatgacacaattgttacaagcgagtggtttaacccaacaatttgaagcccaaattcaaaaacagatgcaaaccatgatgagtcagtatacagcaacaattacaaaatctttacaacaacaaattagtgcacaaatgagtaaacaaatgggaaattttgcaaaaaatatgcaaaatgcgattcatattgataccagtatgtttgctaaagcaattaagatgaatatgaatgaagaagaactttctgaattaatgatgtcactcatgacaaaagaagtatcttcttatgatggaaacttaaagaaattaggttatgttgattttgataaacctagtgcgattaatatctatccaaaagattttgaaagcaaacaaaaagtcattgatattttagataaatacaatgctaatgcagaaaagatagataaagataaagtgatttcctatactgactatgttggaacattaatgtcatcagttactgatattattaatgtgattagttatgtgttaattgcctttgttgccatatcacttgttgtttcatcaattatgattggagttataacttatatcagtgttcttgaacgtaagaaagaaattgggatcctgcgtgcaattggagcatcaaagaaaaatatttctcaagtctttgatgcagaaacctttattataggtttattatcaggattattaggaattggtattacgttaatcttattggttcctggtaatatgcttatccatgaaattgcaggtaatgtcagtgtaagtgcaactttaccagtaggtggagcgattattctgattgtcttgagtgttattttaacactcattggtggattgattccatctaagaaagctgctcaagaagatccagtaacagctttaagaactgaatagtatttaaaaaggggctgtaacgagtaaataaacatgttatagtttcatattacgcaaaaagcgctcatttgagcgctttttttggtataatttagtcgatgaaaacaaatatatacgagacttattataacgcatatcaaccttatatgctactagattttaacttatcttttgatagtgatatccctcatgatgatatttgtagaactgttcttgaagttacggaaaggattaatttatgtaaatatgttgacttctctaatagaaattctcatgggtatgatgcttttatgatgttcaatcttgttatcctagctaaagctctttttggttatgcttctaccagagaccttgaaaagctttgtcagactgatatcagatttatgtttatcgctaaaaatcaaaaaccttctcatcagtcttttcatagatttattcatgatgatctgactatgaatattgaagatattttttatgatatcaataagtatcttgaatcaaatatggatattgatactgatgtcttatgtattgatgggactaaatatgaagccaatgccaataagaatacttttatctggcgtgccaatactgttagaaatagaacgaaaagatggaaacgaacacttaattgtattcataaaataaacaattatttttctagtgtcaatatatcaactcgatattcattattaaaagaaccaagtattgattatcttttaactatcagtgaaagattagaaaaatatatgctggatcagaatatacagatggtccatggaaaaggatgcagaaagccagttatccaaaaactatatgaggaattaaaagaaaatgccttaaagatgtgggaatatgctattcatatggatatgttacaaaaccgtaatagttgttcgaaaacagatcctgatgcaacatttatgcatatgaaatacgattactataatcatacaaatgtatttaaaccaggatataatatccaatttgggataagtgatgggataataagaaacatatatattagtagtgatggaaatgatttaaaaacatacataccatttatgaaaaaatataaggaagcatatggaaagctacctaaaagaacaccagcagatgcaggatatggaagttatgataattatagttactgtaaagaaaacaatatcgagctatatatgaagtattcaggatattataaagagaaagaaaaagtaacagaaaaaaacagatataaatcaatacactttatcaaagatgatgaaggaaattatatatgtccagctggacatgcatttgaacttgaaaaggagacaatcgatagacaaggagaatatgaaagaataaataaacattatggaaacagacattgtgaaggttgcccattgagaagcaaatgcaccaaagcaaaaaatgggagaacattggtacgttgtgataagctggaagaatatcatcaagaggcaaaaagcaacgtgacaagtgatgaaggtatcaagctgatgaagaaacgaagcaatgagtcagaggggacatttggagatttaaaatataatcagaaatatgacagattacgtcggcgaggagaagctggagtaaaattagagatatatttaatagcgataggagaaaacctaaggaaatatcaccgaaataaaatgaaagaaaaagaaaagaaacaaataaactaataaatttttaaaataaaagaggtagttctttttgagtgcgccaaaaagagtaaatgaatgagaaaaagaaagagtaaaaaggctaaaattttctcattcattttaatttacaaaaaaagagctgtaacgctctaaaatagttgaaaaactacttactcgttacagcctcttttcatatgttcctttgattatttgtttttgatttctaacatgaatctttcctaatgcaataacatcctgtatattataattttgatcaagtaaaagtaaatccgcatctttaccaacaataatttcccctttatttaagcctaaccctttagccacattgctagtaaagaaagggagagcttctcctaaactcaaattattttttaacatatattgaaattcttcaaagagacaactaactgaagaaacaccgatatctaataattgaccagattgatcataagtcgaccaacttccttggccatcagaactaacagttatatgatctaatggtaagcctctttttttagcttttaaaattgcatgagttgcactcatctgaggttcagctgttaagtcaatataaccacccattgaaagaagtttaaaaccatcttctaagagctgtttatttctagcaacgtgagtaggtctaaataaacttactggaatatcagtagattcaataattttaaagacttgactcaatgctttcttttcatcacccatatgtaaaattaaaataccacattttccacttaacatactgcttacacgaatatcactcgctaaacgtttaagttctttcgtacgcacatgactagaacgatgatcagataaggctaatttgcagccaacaacttcatctataaacattatgtcttttttgatatcatcagttattgtgattggcggatattgataagaaccactaacgattaaacaactgattccttcttctttaagtgctttagccttagccagtaagttttctacattacgagaaataccatcagtaccgagtaatcctaaaaccgttgtaattccatgacgtgttagcttagaaagtgttatctcaggagctttggttttaaaacttccttctccacctccaccagtaatatgaacatgttggtcaataaatccaggaacaagaattttattatgaccatcaatcatttcaaataaatcagtatcaatatgatcttctatcatttctattttatctgatattaaaacatcttttcttccaatatatttaggattataaacatctatatttttaattaaatacatcaataagcccccttactttatttattataaaataaaagatagaaaaggtatattcttttttcaagtcatagaaattttaataaaattgtagtatattaataaaagatttggataaagagggaattttatggataatttgatttttagtttaaatgcaacattaccagtttttttaatgatggtattgggaattgttttgaaaaagataggatgggttagtgaatcttttgcttcacaaatgaataaatttgtttttttagttccattaccactcttattatttcaagatttagcaactgttgattttgaaaaagcttggaattttaaatttgttgccttttgttttatagtaacagttttgagtattacacttgttattgtgatttcttcatttttgaaggaaagaagcttaagaggtgaatttatacaagccagttatcgaagtagtgctgctttattaggtgttgctttgattcaaaatatttatggacattcagtcatgggtccattgatgattattggcagtgttccactttacaatgttatggcagttacagttttatcaatctatcagcctcatcgtaatgaaatggataagggtctattgaaaacaacccttaaaggaattataacaaacccaattattattggaattgttgtcgggttattatggtcaatcttgaagttacctatgccttttatcttatctaaaactgtttccaatatcagtgctatggcttcacctttaggtttaatagcaatgggtgcaagttttgatattaagaaagcttttggcaagttaaaaccagcaatccttgctacatttattaaactctttggattttgtatgattttcttaccgattgcgatagcgtttggctttgtaggagaacaattggttgctattttaattatgttaggttcagctacaacagtgacttgttttgttatggctaaaaatatgggacatgctggtatattaagtagtaatgttgtgatgttaacaacattactcagtggtttttctattactttatggttatatattttaagaactttacaatttatttaataacagattttcttcttatacataggatataaggaagggaattgataagatgtatagttattatgatttgaatgattacaatgattatcagatgcgagctcagagtcaagttacaaatgattttggacctaacccatttgtaatagatattgaaaaagcgactatgaataatgattattttagagtagctttatggacaggatcacatttacaattaactgtgatgagtattcctgtaggtgaggatattggtttagaaagacatcctgaagttgatcaatttttacgtattgaagatggcattggcgttgctatgatgggtgataagaaggataatctttattttcaacaacctgtctttgagggaagtgctatttttattccagctggtatgtggcataatgtggtgaatacaggaaataaaccattaaaattatattccatttatgcaccagctgatcatccttggggaacagttcatcctacaaaagcagatgctcaagcacaagaacatcattgacacgcataagcgtgtttttcttttattaagaaatgtcttggttttctttatatggttatgagataataatgaaagaaagaagggtgtctatgctttataaaacattttatgaatcatcattaggaaatattttgattgtaagtgatgaaaatcatattattggtttgtggtttgaaggacaaaaatattttctagctaatatcaaagacgatataacacagaaagatgatttgccaatcttacaatctgcaaaattctggttagaccaatattttgctggtcaaaagccaaatatagctgatttaaaattagcaccgagaggaaatgattttcgattgacagtgtggaaaattttatgtgaaattccttatggacaattaaccacttatggtgaaattgccaaaaaggttgctattgttatgaataaagaaagtatgtctgctcaagcagtagggggagctgttggacataatcctatttctattattattccttgtcatcgtgttgtgggaagtcatggaagtttaacgggctatgctggaggaattgataaaaaaatcaagttattgcaatcagaaggtgtcgatactaaacaattgatgattccaaagaaaggaacagcattatcatatggcaacattaaatgatgaatttttatatcaggtttttgcaattgtagaagaaattcccctaggcacagtagcaacctatggtcaaattgcacgtttatctggatatgataaaaatgcacgtttggtaggaaaggctttaagtttatcagaatactttggtaaatatccatgccatcgcgttgtcagtagccaaggaagatgtgcaccaggatggtttgaacaaaaagatttactcactcaagaaggtattacttttaaagaaaatggctgtgttgatttaaagaagcatcaatggaaaatgtaatttctttattgatcaaatgataagatggatttactaaaaggtatataaaaaggattaagaaaattcttaatcctttcatgttattacatgatgtttatgaaatctaagttgaattcttttataatcttgaatattgttcataatgaataagactggctgcatcttgatcacaaattactgtaaaattaggatgaagttttaaaattgttgcagggacatcttgattaataggttcatctaaaaatcttttaaagatttctgctttttctttaccatttacaatcataaccaaatgcttgacacgcatcaaactctttggacccatggttagagtaaaaggttgataagggcgatctttgtaatctggattcacagcttgtttttctttaaaatcaatttgataagtataactatcaaaaggggtacaacgtggacaattcccacaaaaatgaccatcatagcctaatccaataaccatgacatcaatcccaccaacatttcttatttcattatcataatcttgccaattatcagcattcataatatgaatacgactatcaggaatattggctggtttaaagaataactcttgcatatctttccaatttggtccatattcttcatttataaatggattttcatcgaataaatagtactgaatatctttaaacttttcttgatttttcacataaggaatcatcatatcatacatggttttaggagaacgacctgatgttaatgaaacattcacacgtttgtcttgcatcattgcacctaataaaataaacatagcactttcactcattttttgttcagtttcttcaataattagtttcatattaacctccaagatatttatctatttttagtatattgtgttttttatggataagcaagctatggtgaagatttaaaaaaagttatcaaggaatctatccaaagagaaccaaaaacaagaggaaagcaagttatagaaatgttaaaatgatattgttgttgaaaggaagaaaaaatatggaatggaatgaaaaattacaggcaattattgattatgtggaagaacatttgcaaagaactgaggaagcaatcaatccattagaaatagaaagattagcaggatgttcatattctttctttcaaaaagtattttcatatatgaatgatatgagttttgctgaatatgttcgttatcgtaaattaactttagctggttatgatgtcatgagcacacaaatgaaaattatagatattagctataaatatggttatgattcaccaacatcatttacaaaggcatttcaacaattccatggtgtctcaccaagtcaggcaagaaaaacaagacaaactttaaaagtttatcctaagatgcaattgcatatgaagcaaagctatgattggcgattagaagaaaagtcagcaatgcgactcattggaaaaagtattcgtctttcttatcgtgatcatattcattttcaaagtgttcctgaattttggagtgagtgtcaaagaaatggagactatgcaaaactctatgctttagatgaaggaaatacattaggtatgtttggtttgtttcatgattataatactttaaaaaaagaatgtacttattctattatggtgattaataatcatgaaaaaagtgatgagtatgatgaaatattgattcctgaagcgacatgggcaatctttgattgtcgagggagtgttccccaagctattcaagaaggatggaaatttctttatcaagaatggttagttcagtatccatttttacatgatgcttgtccagagttagagtggtatagttcacaaaacacatatgcgaaagattatttaagtcaaatatggataccaattattgaggaggattgaaaatggtacatttagtttactgtgataatacagggaaaaagggcgaaagagttttagataaaattatttctaaaaagaaaacaatggtggtcagaggtgcggcaggtagaaagataccacatagtcgagttcatgctggagagacattgtattttatggagaaaggaacaagtttgattggtgtgaaagccactgttaaggatgtacaaaattatgcaaaattgactgatgagcaaattacacaagttttatctgatcatcaatccaagctaaatttaacagagaaacaaaaggtccgttggcataagaagtttttatgtttagtggaattcgaagatgttcaacaaattgaaccattagagtttgaacatcaaggaaatatggatgattggttaattatagagaaaattgaagatgttgttgtgggaacaagtattccttataattatgaaaaatcaaaattgaaataaagagaagatgttatgaatcttctcttttattaaattaactttaagcaattgataaaagtttgctttgtgctataatatgggtagatgaaaagttttttaactttttttaagaaaaaagaagaaaaatcagactttgcaagcgtatatataagtatagggatttatatttcctcagtgtttttcaactataaaaaggaggaaaaataattatgagtttacttattcaaaaacaaacaaaactgatttctaagcctgatctgatttacaaggatttctttaaaaaagttgaaaactttatggatttgatgaatgctttgctttttcagggaagggcactcattgatgaaaacagtcttgtcttatgtgatgccaatgcaacgacgcattttgagtttgatgatgaggtgattggcgttggcaaacaaagagatgttctgatgaagtgtacagtcaatggggtagcgattctgctgggtctggagaatcaatcaacggttgactattctatgccttttcgtgtcatggattacgatacgattacatatcagcagcagttcaaccttcaggatgaggacaagcgtcaatcatttcatcccattcccgtcttaacacttgttttatatagtggagataagctgtggcatcagccatattcactgatagagcggatggaaataccagaagccttgaaaggatgggtgaataactggaatggaaatatctatgatatcaaggatatcagggtagaatggttaaagaatccaaaggttaaagcagtcattgaaggtgtccagagaatctatcaatgggatcgggataaagaaagcttgaatgatctgatattaagtaaagaggaagcgattgtagtagcgataatgaccaatagtgaagaattggttatcagattagagaaagaagaaagtgaggagatcaagatgtgtgaagtgattgacagctatgcaagagaaagagagctacaaggaatcaagcaaggtatcaagcaaggtgaattgcaagggatgatgaaagagaaaatatcattgcttgttagacaattgaaacagaaactaggacatgtatcaaaagaattggtgatgcagatagaagtcagtccagaggacaagttagaccaattgacaatcaagatttttgatgttgaagatgaagaagatgttttagaaatattatcttaattgatatttgaaaagaaacctacatattgggtttcttttttaattttatttattcaattaaataacaaatttcagttaccaattcatcagtgttttgagttatcctattaacaatataataagatatatctgtaatatacttatacccacctctggttaattaacaaagctgtaattataagaattgagcaatttcttcattattttgataaacagaacgaatctttattatttgttttgtttcaaaatcaagatatcataaatatttaatatgtaaaacaacatataattattgaggttcataaaaatgataacttttttgataataggtgattttaaaatatccggctcatcataaaaatgaagcatataattatctgtgataactttgaaaaaccataaacttttaacaattagaagtcctcctttgagctcaatcatagtataaacataccatgatgtaagaggcaagtcgatattttaaagcttattaataaagtttggatctttcataagaggtcttgcaaaaccaaaaaattgaacttttgtattgttatagattggtaaaatatcatctaatgatttaagtccaccagttaagataatagaaatattcacaagttctgataattcaatagctgcatctttataataagcactttcttcaggtttgtgatttttccaagcatttccactcacttcaatcacatcaattccatcctttacaagaatttgtgccatctttaagaagtcttgaactgttaaaccatgtgggacttcatctgaacaattaattttaatccagataggataatcttttccaacttcttttctaatagcatgataaacttcttgaacaatacgaatacgattttctacacatcctccatattcatcactacgatgattatagagaggtgaaatgaattgtgataaaagataaccatgtgcacaatgaatttgaacgccatcgaaaccagcttcttgaacacgttttgccgctttggcaaataaatcaacaacagataaaatatcttctttactcatttctttagggataattcccgttgtttcatgagcaattgctgaaggtccaagaatctttgcttgatcaggaaaagcttgtcttgaagaactgccatgaacaatttgcatgacaatttttgatccacaatcatgaaccctatctacaagttttcgataatcttcaataagattatcacagtaaataccaagttgatttttagctggttgttcatattcgctaatataagaataacttgtaataattgtgtcaatatttccttttgctagtttttcatataattctataatggcttcagtaggtcgaccatctatagtcgccttaccttcatatgttgcagaacgaataaagtgatttttaacttctaattgaccaatatgtgttttttcaaataatgacattatttttctccttcaaattttattgtacttttattatattctttatatactgttttgtatagaaaggatgattataatgaataatgttgatgaatatattgaatcattttctgataaaagaaaagatttactaaagcaattaagacaaatcattaaagaaacaataccagaagtagaggaaaagatatcttggggagttccaacttattattatcatgggtatcttcttcaaattgctggaaataaaaaccatgtaggattttatacaaccccaacaacacttacatatttcaaagaagaacttaaagactataaaactaatggtaaaaataccatgcaaatatctttacatcaagaaattcctacacaattaataaaaaagatgattctttttcgcgtcaaagaaaatactcagtaacttataatatggattggttaaatataatataaatcctgaccaagttttgataaagcgtcataatgaataatcaaaaactgacttctttttgtcttttgaatatatttcttttcacaaaaatcattaagaactctttgaagttgtcgataactacaaccaatcatttccgcgacttgaacaaagttttcttgaataattttattttcagcacaagcaatcaaataagatgcaagtcgattttccacaggataattctttgaaattgatgagttttgatttgcattatagagtttttgagaagttgttgttgcaagatagcgcatgaaagaaagatcattgagtaataaatgttcatagttttttattgaaattcctaaacataggcattcatcaattgcatagatatcattaataacatcttgatgatttaaaaactcaatttctcctatcacgctcattgattgacaaatagcaagtaaactaataataccattagaagtcgtatgacaagtttttattttaccatcaattaaaatataaagaatttctaattgttgcccttgatgtaaaataaaatcacctttatgaaattgataaaattgaaaacaaggcaaaagttcttcgcttatcatatgttcttgtttaagtttttctaaatataactgtaaatttttcatattctcaccatctttaatatgacatatgtcctattagaaatcaatggatatctttataatgtcttaaggaggtatcaatatggaatttattcttgcaatattggcaggtacgattgtaacaattatgaatgtttttaatggtcaattatcaaatcaagtgggtgtttatttatcaactgtgattatccatcttgttggtcttttcacattaattatcattatggtcatcaaaaaacaaaaaatatcatttcaaaatcatattcctttgattctatataccggaggtatgataggagtatttactgtgctttttaacgttatatctatttctacaattggagctgcactcgtcactgcactaggattacttggtcaaatgttaacatcattagtcttagagtataaaggctggttaggagccaagaaaagaactttgacatttcaaaaagttataagtttagtgcttgttatgattggaattggggtgatgatattatgatagctattctatgtgcaacttgtgctggagttacgattgttttaagtcgctctgttaatggatatttatcacaaaagataggggcttatcaaagtacattctttaattatttcacaggtttcttaatgagtagtgtatttttgattttatttggctttttcaatctcaaaggttttcaatttgatattcttatgcgacaaccgactttggtaattggcggaatgattggtgtttttaatattttaatcctcaatataatagttcctaaaatttcacctgttcaattaactttaataacatttgtcgctcaactattaagtggtgttgttattgattattgtatttatgatatcttttccattcaaaaacttataggatgtttgattgttattgtgggacttattgcttatcaattatctgatgaataaatattataaaaaagacaaaactctataaaataagagaattgtctttttctattgacataatcactactatgtaatattatataccagtattaagtatgacttaatagtaggagggatgaaaatgaataacttgacagaaatgttaaaaggggtacttgaaggatgtgtccttgaaattattagtcgtcaagaaacttatggatatgaaattactcgtcaactcaatgatttaggatttagtgatgtcgttgaaggaactgtctatacaattttattacgtctggaaaaaaataaacttgtgaatattgaaaagaaaccttcaaagttaggaccacctcgtaagttttattcattgaatgaagcgggatataaggaattggaattgttctgggaaaaatggaagtttgtaactacaaaaataaatgaacttaaggagatgaaataaatgaaggaattttttaatacgtattttaatattaaaaatatgatggatgaaaaaagaaaatatagacaacagatggcaagagtcaaagctttaccaaatgattatcaatatgtctttaaaaaaattcaagaacatatgtggtctaatgttacagggagtggatatgatatgatggaattgcaatatgacttgttagatctttttgaagaaagtgtcgccaatgggaaaccagtcttagaagttacgggtgaagatgttgctggatttgttgatgaattattaaagaatacaaagacttatgagaataaatggaaagataagatgaataaagatattcatagaaagatagaaagataaacatcataaattaaattttgtttgaaaatattgagatatttttgtgaatcgagttactgttgagaatatagtcctcactttctttcaaaggagggactgataacagttttattatattggttcatggtgtgcgttttaattttgtatcagctttgttccattaaaagatgtagattagaatcagatgaagatgaattaattatctatagagatgtttttataaaagaaaaaagttaagaattttgactcttaacttttttaatctttccatattcgcatttgaggagaccaccatcccacaatgttatccataagatcagcaataaaatcagatataagttcatcatctgaattttgataatattgatgcagtatatgataaacatcatcttttttataaccaagatcataccattcttttaaaagattatatcctttttgaatgtgctcagcatagtttttcttagataaagacgtacatagtatttctatttgattcatcatttcttcagtattcataatcatcacctagaagtattataacattattaataaaattatgattaaataatgaatttatataaaaaatatataaataaactagaaaaaatataaaaatagaacattgtataaattataataaacgtgtcgataaaaaagaaatacgtatttcaaggaaacattatgaggaggatctatgaaaaagttagaagaatttttacaaagatttattggaccaatcgctgaaaaaatgagtaacaatgatgtgattcaatcagtagctgaagggttcatgagaacaggaccagttacatttggtgtctgtatatttgttattttagggaatttaccaattgatggatattctgattggttaataagcattggaatgaaatcccattttgatgccatttcaaatgccagtttaaatgttttggcattatatatttcttttaccgttgcgtatgcttttgcaaaaagaaaaggggataatcctctatcttgtggggttttatcattattaagtttcttattaattattcctcaaacagttgaaggaaaagatggtgttattaatgcttttaatgtgacttatttaagtggaactggtattttagttgcgttgatttttgcgattattacaggttatatgttccatttcttatcttcaaaaggtttgaagtttaaaatgccagaaggtgttccaccgatggtaagtgaatcatttgaaccaatctttgtttctatgattattgtcgcttttgctttcttagtaagagttggatttggttatacaccttatggaagtttcgttaatttctttgatcaaacaattggtgcatttattattaaaattggtttatcattaccaacaatcttcttattatattttgccgcaaacttattatggttctttggtattcatccaaatactgtttatagtgcctttgtacctttacaaatgacattagttttaacaaatattgctgatgcacaagcaggaagaccattaacatatttaacattgacactagtttcattatttgcttcatttggtggtaatggaaatacaattggactttgtttatcaatgtttacagctaagagtgaaagatataaaaagatgttaaaattagcatttattcctaacttatttaatattaatgaaccattaatctttggtatgccagtcatgttaaatcctatcttctttattccaatggttttctgtaatgttgtgatgggattgattggtttagcagcaacacatatctttacctttacttataatccagcaatgtcattattgccttggacaacaccattctttgtgaaagcatttatggcaggaggtatttcattattaatcatggtattgattttacttgctgtaaatacattaatgtattatccattctttaaaattgctgataagaaagcttatgaagaagaacaattagcaaaggctggtggcaacattgagtcaattgagtaaagattttttatggggtggtgccattgcggcaaatcaagcagagggtgcctataatgtaggaggtaaaggattatcattaatggatattgcaacagctggaaaaaaaggtgtttcacgtcattttactgatggtatccaagatcatgtttattatcctaatcatgatggtgttgatttctatcatcactatcaagaagatttagcaatgtgtcaagaaatgggctttagatgttttcgaacatctattgcctggagccgtatttttcctcatggggatgaagaacaacctaatgaggaaggtttaaaattttatgatgatttatttgatgaaatgctaaaaagaggaatgcaaccagttgttacaatttctcattatgaaatgccattatatttagtcaagcactatggtggttgggcaaatcgaaaacttattgatttttatcttcattattgtgaagtgatttttaatcgatataaaggcaaagtgaaatattggatgacttttaatgaaatcaattcagtcatcttaatgcctgaaattgcaggtgtattagatagaagtcgtgatgattttattgaacgtagttatcaagcagcacatcaccaatttgtcgctagtagtcaagctgttcaattaggacataagattgatcccaataacaagattggatgcatggttttaacacttgtccaatatccattaactgcgaaaccagaagatgtagaattagctgaaaaagcaatgcgtatgaaaacattctcattttcagatattcaagtacgtggacattatcctcactatgttaaaaaacatgttgaacgtttaggtattcatgtacatatggaaccaaatgatttagaagatttaaaaaaaggttgtgttgattttgttggtttctcttactattcttcttcagcagcaagtagtgatccaaatgttgaaaaaacaggtggaaatttatcaagtggtgtaaagaatccatatcttgagacaagtgaatggggatggcaaattgatgccaaaggtttacgatatattttaaatcgtttctatgaacgttatgaaattcctttgtttattgttgaaaatggattaggatataatgatcaaattgatgaacatggatatattgaagatgattatcgtattgcttatttaaaagcacatattgaagaaatgaaaaaagctatcttagaagatggtgttgatattataggttatacaccttggggatgtattgacttagtgagtgctggaactggacaaatgagtaaacgttatggttttatctatgtggatagagatgatcaaggcaatggaacaatgaaacgttctaagaaaaagtcatttgattggtataaacaagtcatagcaagtgatggtgaaaaactatgagaattgccgtttttgatgtcggtggaacatttatcaaatattcattgatggttgatgatgtcatgactttacaagataaggttaaaactccttatgagaatcaagaaactttcttaaaaactattgaaactgtacttgaaacgttaaaacctgtagaaggtatagccttttctttaccaggggttattgatgttgataggaagtatatctttgcgggaggaagtctggcttacaataatcatactgatgttagggcttgggaagaaagatttcacttaccaattgaaattgaaaatgatgccagatgtgccgctattgctgaactagaagctggaaatatgcaaggaattaaacaaggtcttgttttaacttttggaactggtgttggtggtggaattatcattgatggtgatatttataaaggtagccatttaattgctggggaagtcagtgtgattttctctaagagtcctaaagtttatcattctaaaggtttatttggcgcaattgggagtgtctataacttagttgaaaagattgcaaaagcaaaaaatagtgaaacaagagatgggaaagaagtctttgaatggattcatcaaggtgatgaagtcagtcaaaagatttttgatgaatattgttatgaagtgatttgtgaattacataatatccaatgtttattagatccacaaagaatttgcattggtggtggagcaagtgaaaatccattatttattgaaggcttacaaaaggcatcagatgcattttataatgacttccctatcaaattcccacatgcccaaattgtgaaatgtcaatattgtaatgatgccaacatgctaggggcttactatcattataaaaagtataacgatgaaagataattctttcatcgttaatgtttattcttatattcacttggagaaagtccagtaacagctttaaagactttatgaaaatgactttggctagaaaactgcaaaatatctgagatttcagctaaagaataatgagaagtttgaatcagaaactgagcttcttgaactttcttttcattaatatattgtttgatagattgatgtgttacttttttaaattgggttgataaataacttggattcatgcctaccaaatcagccaaatcatttaaagaaatactttgatgaagatgatgagaaatatagttcttacattccttaacccaatgaggattttgaatattcttataacgtttgactaactttgtaaagtcgataatagcatcagaaacactcttatgtaattggtcaatgctttgaacttgatcaactttcataatataaacatcacttagagtgtaggcttttgcgataggaacaccaacatcaatcactgctcttgtaaataaggtaataacggctacaagtttgtatttaattgattgaatttgactttgcgataattgacgttcatccttaatttgcattagctcactcattaaaatacgagcagctgtactattttctgattgaatataattaatgattttcttttcataagaataactaaaatcatgtaatggattttctctgattttaaagatttcctgttccaaactattttcttgttttaaaggttgaacagaggcttcacgataattcagttttaattcttcagcttttaaaatttgaccagtgatgacttgataaataaaaatgagttgtgaagtgatttcatgatgagcataaggaagattgataaagtcattaattttataaggtgatataacatgctttaaaaaaggaaaatctgagggatgatcttgagatgtgattttacgtggaaaataaggtccaatgcaaataaattgaacatcatcaagaatatatgcaaaacaaaaataaatttcattttcatggaaacaagtataaatcttatattttatgatatcttgtttgttgataaaatgagtgaaataatcttcttctaattcaaagaattgttgaggatatccaatgattttcatatcttttgacaacaagaatagaggcatatgaaagttttgataaataagagggattagattttgcagttctttgcttgtttgtatcatagaatcatcctttcttatttattgtaacaaaaatataaagaaaagagggaaaaagatgttaaaaaaagattttttatggggtggcgcaacagctgctaaccaatttgaaggtgggtataatgaaggtggtagaggtttagcaacttctgatactaaaaccaatggatcgttaactcgaaaaagaaaacatagtttcatagatgaaaacaatcaaattgtttatttacatggaagtgattatatcccacaaaattataaaagtataattgatgaaaatatgtattatccaagtcataaagctgttgatttttatcatcattatcaagaagatattgctttgatggctgaaatgggatttcaatgttttcgtatgtctatttcatggacaagaatctttcctagaagtgatgaagaaacaccaaatgaagaaggactaaagttttatgataaagtttttgatgaatgtttaaaatatggcattcagccagtcgttacattaaatcattttgatatgccactttatttagctgatgaaaaaaatggttggttatcaagagaaacagtgacttattttttaagatattgtgaaactgtctttaaaagatataaaggaaaagtcaaatattggatgacgtttaatgaaattaatcttttaagaggttatgatacattaggggttcatgaaatgaatcaacaacgttattatcaagccatgcatcatatctttattgcgagtgcattagctgtgaaaaaaggtcatgaaattgatccggaaaatcaaattggtatgatgttagcgaatatcttaacttatccagaaacatgcaatccaaaagatgttgaattggaattaaacgtttcacgtcgtttaaaatatttctttagtgatgtacaatgtcgaggttattacccttcatatatcttaaaacttttagaaagggaaaaaattgttattaaaaaagaagcacatgatgatgaaattttaaaagagggttgtgtagattatattggttttagttattataattcaggagttgttacaacaagagaagatgccaaatcaacattaggaaacggagtgaaaatggcagaaaatccatatttacaagaaagtgaatggaaatggccaattgatcctattggacttcgtatctcattaaatattttatgggatagatatcaaaaacctttatttattgttgaaaatggactaggtgccaaagatcaagaagaagctgatggaagtattcatgatgattatcgtattgcttatatgcgtgatcatattattgaaatgaaaaaagctgtcgaagaagatggtgttgatttaatgggatatacaccttggggatgtattgatttggttagtgccggaacgggtgaaatgaagaaacgttatggaatggtttatgttgatatggatgatgaaggaaatggaagtttaaaacgattgaagaaagattctttctattggtatcaaaaagtcatttctagtcaaggtgaagatttatagggaatgtaagttccctttttctatacataaatataactactcaatatacttttatgatcatacatataatgaaattgtcaaaaaagagattacaattataaattgaatcaaactttaacttatcgtttattagaatctcaaattgtttatatattttatctgatttaaaaagtactgtgactaatccaattttagaataatttattttatatgtataaaaaatcattcatcagcctgataggtatgatatagtaagataaagaggtgatgatatgcgtaatccagaagaaacaattggcaaattgattgataaagcaactgtgactattatttcatattgtgatgatgaaggttatccaattagtaaggctatgttaaatcctagagaaagaattgggattaaggaattttatttaacaactaatacttcatcagataaagtaaaatattttaaaaagaatcctaaagccacattatattttgtggataaaagattttttagaggagctagtttaatcggtgaagttgaagttttagaagatgcaaaaagtaaagaaagaatctggcaggagggggatacgatgtattatcctgaaggtgttactgatccggattattgtgttcttcatttcattgccaaaagaggaagatattatagtaactttaaaaatgtcaattttgaaattgaataattttcttattgcaaataaaaacatatagtgataaaataaacacgaagataactttgagcataagtaagtgttacaagatgaaaaacttggcggtggctggaatagaccagagcttatgaagtgttaatgaggtaagtatcaattttggtacttactttttttattgaaaggagaagaaaaatatgttatttggtgttggtcttggaatagtgaatcagttatgttttgataaaaaaagttataatcggcaggaggatattcaaaggataagtgaattttttgatatgtcattgtatgaccgatttgaagatgaaaagcatcttagtttttgtttgaaaggagatattcttgaaaaatatctttatgattttttgtttgaacaagctgatttgatgttatatggtgaaaaaataaagaaggatattgagaagttaaagaataaagatagtgaggaactgctttatatgattcgaaatgagcattgtgattttattcattgtaaggagcattataatgaatttctaaagcatgaaagtattttttatttttatgatgattgtattttatcaggaaatgaggaacgttatttttatatttacaacttgcttaaaaagtcaaccgataatctattgaaaggtactatttgttttgataatacctgactcaaaatataaaaaaagacataaataaaataaatatgacaatataaaacaaaagctggggaagataaatcctagaatgaaaaagattttacaaataaaggtaatcacaacattgttagatgatttttcactaaaaagtatgttataatataataaatattttttagcaaaggaggatttaaatgaaaaatcatgaacatttgttgtttgcaggaaaagatttaaaactcttaaagtggattggaatggagctagaatctgaatttgttgttcactatacacaagaagtagaagaagtgaaaatgatacttgcaaatgaactcttgttgtcattgattgttgtggatacagatgacttcgatgttgattttgagattgcagaatttgttaaaaaataccctagacttgcttctttaccagttgtggctttaggaaaggataatcaggatattgaattaaaatatctacaattaggagcaactgattttattaaaaagccattaaaaaaagagatagttgtcaatcgtataagaagtatctatcgtatctataagtgttatgctcataatgaattatttgaaaaagatatgttaacaggagtttataataaagaatttttcttaaatgaagcaaaatatattttagataaaaatactgatattgattatgatttggtatgttttgatattgatagatttaaaattattaatgatttatatggaactgctggtggagataagttattgcaatatattgcaaagatttatttagatgctgctttgcttcatcattggattattggaagattgcataatgatgtatttgttattttgatggaacgaggaagtatggattatgatgaacttacgcatctttttgctcatcatgtagaatcatttaatattaaacttgtattaagttttggaatttatcctatcacagatcgaagtttaccagtaagtgttatgtgtgatcgggctttaatgacttctaaaagcatgaaaggtaattatcaaaccagttatacgatttatcaagagtctttaaggcagaatattattgaacaacaatctatgattaatgaaatggaaaattctttattaaaaggagaatttgtaccattttatcaaccaaaatatcatattgaaacaggtcatattattgggtttgaagcattagtaagatgggttcatcctacgaaaggtattattcctcctagtgaatttattcctttatttgaagcaaatggttttatttctaaagtggatttctatatttgggaagaagtatgtaaagatcttcaaaaacttatgaaaaagggttatcaagttgtacctgtttctgtgaacgtttcacgcatagaactttatttaaatattgaagaacatttactatctttattagagcgttatgaagttccagtttctttattaagactagagattactgaaacagcatatacacaagatcctaaacaattgattgatgttgtggaaagactgagaagtcatggatttagaattttgatggatgattttggaagtggttattcatcattaaatatgttaaaagaagtgcctgtcgatgttttaaaggttgatttgaaatttttacaggatttacagacttctggaaaaagtgaaaaaattttagagtcagttgttattatggcgagaaaattgaacttatctgtgattgctgaaggggttgaaacgaataagcaagttcatttcttgaaatctattggttgcttacgtgcacaaggttattattatagtcggcccgttaatcaggagacaatgtttcaactctatgaaaatccacatattttaatgggagatattaaagatcgtattgaatcgattattaatgtcgaagatttattaacacagatttatcaagttaatgatgttgagtggtatcgtagtgcgtttttaaaactagatgctcaaatatttgaatatgactttaaaacagatagtatgagatattatgattcacgtatttcgccaactaatggaaaactaagtaagatagaagttcctaattatattcaacgtattcaagaggggtatcatattcatcctcatgatattcatattgccttagatttgttatcaggaagaaaagaagtgaaatgtcgtttaagggcacatccttatttttcaaatgaaggatatcagtggtatgaagctgttgctagaacgatatatgatgagaatttaccaaaagttgcagttggagtgattcgtaatattaccaatgaaaaacttaatgaaatggtattaaaagctttgcttatgattgatgcacaaaaaggtattcatttatcagttcgtgaaatttggaaagatattgctcaaggactatgctttgatatggcttatagtgttataagaacaaacaatcaaccttgtgtagatatctattatcaagataacaaaaatctcatattaccaaaacacttaacgcctttttcatctgagcagatgaatgctatgaaaaaagaatatgaagtacaccaaggtatattatgcttgaataatgaagatatccatcatcctttggttcaagattatatttatcctagaatcaagagtatttgttgtataccaagattaattaatcatgaatatattggagatattgtttttgtaagtagtcaaaaacgtaaattaacagaaaatgaaaaagctgtatttatagaagttaataaatatattgaagcatttatgaatattcaatattatgctaaagagttacaggataaaaatgagttatatgatttaattatgaataatagctttggaggtgttttattacttaccataacaaatcatcgaatgataggaaagatagcaaatattagcttttatcaattgtttgagttagatagaaatatacctattgaggaaattgttattgaagatttattccaacatcttgaacaagaaaaattaatgcgagcaattgaactatctattgtcaagaatcaacccattatagaaacattgcatggtaaaaaacaagatggaacatatctcactttagaaatcaaaattcaagcattaactcaagatcgttcacaaatcgttttaacaatcaatgatatctcagaacgtattcaacatatacaagaattaaaagtttcagaattacgatatcgtttagcatttgaacaaacaagtttacgtctttgggactataacatcaagacaaagcaattatatcgttctcaaatggttcaagatgaagatggacttgctcagattgttgataatgttcctgagatatttattgaaaaaaatattattcatcctgattatcaaaaagggtatttagatttttacaaaaaaatatctagaggaattgattgtgattatctctttaagagcctacgtaaaaatggagtttataagtggatgcatatttcttatcaagttctttttgatgaatttggccatccagatcatgcgataggagtcggtgaagatgtgaatgaagtttatgaaaataaacttaagattcaacgtgaaaaatattatgaatcgttattccataattcacgtatttattatgatatcaatttaacgcataacagtattatttttaacaaacaagatatatttgataatattcatgattattcatatagtgcatttttacaatatatcatgatagaagtcgttgatgaacaagatcaagaaagatttgaaaaggaatttagtattgagaatcttaaagagtgttatagaaatggacatacatttttatcatatgaatttgaattaggaacccaaaataaacgttggtatgaaatagatgttaatctctattcaccaaatgaaagtgaagatatttgtgcttttgtaacacttagagatattgatgaacgtaaacgttatgaattatctttagagtttaaagtaagacatgatgaattaactggggtatatacaagagaagttatccgtaattatgtggaaaatgtagtgaatcatcaaaagattgctattatgatgattgatgtagatgattttaaattaattaatgatacttttggtcatgcttatggtgatgagacattgaggaatattgcggatgtattgattcaagttgctggtgataatgggattgttggtcgtatgggtggtgatgaatttatcattattgttgatcgttttaatgatagtcaggatattgttaagatggcacaaagaatcaatgataatattcatttaagttattttgtaaataatcaaaaatatgatctttcttgttctataggaattacttattcccaaggtgaacatgattttgatatgctatatacaaaggcagatgaaaatcaatatcaaatgaaaaaatataaaaaacaaaaataagccgtcatggcttatttttgcttagtaaataattttgttagtaattcaactgcaaacgggatatcttgtttagataatcctgaataattaatcacaagagtatgtgaatcatagggttcactataaaactgtgaaagcgtagcaatatgtaaaccaatatgattagctttttcaataacatcttgatcgctaaaatagggtggaaaatgtaataagaaatggagaccggcattttcttcagttattttaataatcgaagcaatctcactttgagataaagaagcaagaaattcatcacgaatagatttatataaattacgcatacgattgatatgtttttcaaaataaccttgattcatgtaataagctaaaataatttgttcaaaacttgaaacactacaagcataaaagccaagtttttgttgatataactgaactaaatgagaaggtaaaatcatatagctaatacgaaaagaaggggaaagtgttttagaaaatgtattcatataaatgacacgttcattttgatcagtttgaaaaagtgtagaaataggtttccctcttaatcgaaattcactatcataatcatcttcaataatataaccctggtgattatttgcccaatttaataattccatacgtctttgaataggcattgtaatacctgtaggataatgatgagcaggagaaatatgcacaatatgagcatgacttttgagtaattcatcaacacataaaccatattgatcaagagagatatattgatattgaatttgatttaattgatagacttttgaaatactatgatgaccaggattttcgagagcgtaaatttgatcacgtccaagtaattgaataacaagattgtataaatattctgttcctgctccaataacaatttgtgatggagagacattcataccagaaaatgcatataaatgttttgcaatagcttctcttaaaatatcacaaccttgttgtggagagcgttttaataacgcttcatcttgtgaagataggacttggcgagttaattttgaccaagttgaaaaaggaaaatgtataggtgaaacagaattgttttttaagtcaacgagatattttttcttttcaacttgttgaatagttattggcgttgtattgggtggagttggataatcaacaacacttacaaaatatccttttttttcaatagaatagatatatccttcaattaataattgattataagcattttcaatagtaatgagactcacattttgattctttgcaaaagcacgtttggaaggtaatttttcgtgaggttttaatttttgatgaataatatcattttttatacattgatataagtattcatacatagggatatctagtgtattttctaaagcataagttaacatataaatcacctcttttctcattataacaaatctggtcatataaaaaaatacaaaactggatatttctatatgaccacattagttatatactaatttcaagattaaaagagggggataaaacaatgaacaataaaacattaaaaataacaatgataggtttaatggcagcactttgttatgtagcatttacttttatgcaaattaaaataccaacacctggaggagcaacatcttttcatttaggaaatactttctgtgttttggcagcattattattagggggagttcctggaggagttgctggagcaattggtatgggaattggtgatttattagatccaacatatgttattgtggcaccaaaaacaattatcttaaaattaggaattgggattgttactggattagtggcgcataaagttttccatattcaacgtttagaaggaaaaaaattatatcaagctgtcattctttcaacaatcgcagggatgttatttaatgtggtaggagaaccaattttctcttatttctatacaacatttattttaggagcaccagaaaaagcagcaaaagctttagcttcatggaatgctattacaacaagtgtcaatgcaattttagctgtgattatatcttcaagtatttatattgcaatcgcaccacgtttacaaagaaatggtatcttaaaacaattagcaccaaaggattaactcctttggtatttttttataaaatatagaaattgacatagttttgcgttataatagaaatacacaaatgccgacatagctccaactggtagagcaggccactcgtaatggtcaggttgcaggttcgattcccgttgtcggcaccatatgaaagaaagccttggattttagcaaggtttttttattttttgaagtgaaatattatttatatttgagttgtgaataagtttataatggctaaagatgaaaaaaataacttaacattcaattcatatgggtgtattatagtaaaaaaggtgataaatatggatagaattgaaaaaagaatagcaattttgtatggtttaagaagaaatcgaatcaatcaattactagaatcatatcatttaacttatgaagattatgagattattttagctttacactatgctgaaggattatcagtagaagaaatagaagctgaaacaaagattgatttaagattattaaagcttattttaaaacatttagtagaaaagaattttattgaaatcaaggatgataaactatttttaagtgaagatacacaaaaaatatatccacaaatcaaacgagcaattaaagataataatgatgaacttattaaatcacttacattggatgaatttcatgatattatcgaaaaattagatagattaattgaatgttatgaataagggaaaatcttttttaagattcgccctttttttgcttttgtatataaaaagcgatataattattttaataaagatattccaaagaggtgattttcatggatttaaagaaaaaaatacttattattgtactagtggttggaatatttttatgtagttttactatcttaattgtgacatatcgtaataaactagaaaatgcctttgatgttttagcttctaaaaatctagaatcttttaatgaaacacaaaaagtagagttagaagctcatatccaagatgttcataatacaatgaattcagttatatttgatacacctaaaaatcaaaaggaaattttagaaaaaatagcccatgtagaatcactacatttaaattatgaaattcattatttatcttcacaacaattagccttatatactgatcaaaaagataaagaatttttatcaaatttaaaacttaatgattttatattaaaagagtatcaaaataaaaatgaaaaatcaaaattcattgttatgttaacacctatttatataaatcaaaaaatgagtggaattatttattctttattagaagtagaaaacttattatctactgcacaatcaggttttttaagaaatgatatagaatggtatttattaacaaatgaaggaagatcagttacaaatgactcaattgcgattattgataacttaaaatcaattactcaagaaacagaaactatagattcaattatcaatgacttaaaaaataataaatcaggaagtcaagttctaaaattagataatgaaaagtattatgctgcttacttgcctctcgcacataatgactggtatttattttccatgacaaatagtcatgagttagatgaactgatgtcaagtttatcttatgaatcaggagttttaacaagtatagtctttacttttatagggattactttaatagcattgctttattttgtatatcatgatcaaaagaaaaagaatttaaatgaaaaacgttttcaattgcttgctaattttagtgatgtcgttgttgctgaatatgatattaaaaaagatattttgaaatttacttctaatgctaaaaaaatgttaaatcttgagcatcttgttttccataactttagaagcattattcgccaaagtgatctgatacatcctgatgattatttaacagttttaaatacatttgaaaagatgagtcaaggagaagtgaatgatccttatgaagtgagaatgaagttttctgatggaatgtataaatggtgcaagattgattatgcattgttatttgatgataataaaaagagtgtaaaaccagtagggattgtttataagattactgataattcaaaggaacatgctatggttgaagaattacaggaaaaatcaagacgagatgatttaacagggctttatttgaaaaatagttttgtagagttggtacaacaattattgaaagaaaatcaattaggaacttttattatcttagatttagatgattttaaatgtattaatgatgagtatggacatactgttggagacaaatgtttactcgcatttgctgatattttgaaatctcaatttagagaagatgatatcttagggcgttatggtggcgatgagtttgaaatttttgctagaggtttaacagataaacaagttcttttagaaaaactagagactttgatgaaaaaacttaatgagattcatattcaagatatttcattaaagtgtagtataggagcaacgattgtaaaggaagatatgctttatgcggatattttcaatcaaagtgatgaagctttatatgaggctaaaaaaattggtaaaaaccaatatattattaaggaataagggaaaagataaatttatcttttccttttcattcaaaatatgaaacaaactttctttcttgaatgatttatcttatacttgttaaagaggtgagaatatgggaagaaaagcaatatttttagatgttgatggaacattgactttacctaatggacaagtttctcaaaaagtagaagaagctatttcaaaagttagaaagaatggtcattatgtatttttatgtacaggtagaaataaagcgggggtttgtgcattaatgccgattggttttgatggggttatttgtagtgccggtgggtatattgaaatgaatggagataaagtttatgaatcttcacttagtcaagaggatctccaactagcaagagatgtttttgatcaacatcatattatgtataatcttgaagcaacacatatgacttttcaggatgaagaaatgaataaagaatttattaaacatcgtttaactgatgaaaaattaaattcagaaatgattagattattaaatgaacaaaaagatcgttttaacattcattcattagaagaatatgaaaacaatcctcaacctattcaaaaattatgttttatgtgtgatgatatacaaaaactagaaaaaccaaaagaaatattatcagaaaaatttaatttcattattcatgaaatcttttctcaagatgttattaatggagagattattatcaaaggaacaaataaaggaaatgcagttcaatttgttactaaaaaacttggtttatcattagaagatacaattggttttggtgatagtatgaatgattatgaaatgattaaagtttgtcatcatgctgtagtgatgggaaatggtgttaaagaattgaaacagtatgcatcatcaatttgtgaaagtgttgaagatgatggaatttatcatgaattaaaaagattaggattattaagctaaaagagagccttatgcatcaaggctctctttataaatatcaaatgaactagcaactaagagatataagaatcccgtttggacaaagaagattgtataatccaacattccatgaataaaaatcataatcgtaaaagcaaccattaaggcaacaagtgatttatcaatattctttttccataagcgatataatctttttatattttcaacaataaatggtgcaattgttaataacccaacaaccccaaaacaaagcaatggatctaagtaaatactatgagcatgctctgtaggatgaccatgatataaaggatagatatgcatatatgtcataggaccttctccaaataaaggatgtgtcttaatattagcaatcgcaacttcccaaatattttgacgagtcataaaataagcaacaatattatcaactctagggaatttcgatggattaaagataaaataaatacaaactaacatcatacatgcaaaaatacatgcacaagttctatagcgtttatcaataatcaacataatcaatatccctccagcaatagctggccatgctgtacgacatgctgttaacaataacataaataaattaatcgcaataatacaaacataatataggaattttttaaaattctttcttatacttggtaattttaagatcttataaaatgctaaacatacaaagaattcaatcatcattgcataatagtttgcattaaagaaaacagaattaatacgatcttgtggtttattaaaaataacaatttctaattgatcaatattaactttatttaaaataccaatatattcaatcaacccataaaaagctgcaaaagcacttaaaacaataatacaatcaacaataaattcaaataactcacttgtaatatgaatacgataatataaaagaaaagataaaatcgctaaaattccaatactacaagcagcaccataaaaattttgatacaacaaagaaacaattaagctcaacccacaaaaataaataatataacgactcttaggaatctgtcgataagcttcctgaatttctcctttccataaaagacgtagtgttaaaaagattaaaactgcaccacacatataaaaaggaagaaacaatgataatatcgctaccacaatatatctttgatgatgattaaaatgttctttgagataatctattccaaaaataataaacacctcccaaaaatgcacctttattttacaacatttctaaatttatgtatactataaaaagtcaacataacaaaaatgtaagaaataaattgacggaaagaggacaaaatgtacaaatatctatatatttataactattcaccccatgaacaagagctttgcgaaatggaatttagacaaatatttcatactcaaatgaaatcaaaatattattttacgaatcaattctttgattatacgagaagtgtttttatcaaaggaagattggatatctttcaatcatcacaaaactttgatgaaattgttgcttatatcgaacaatcaaaactatgttactatgattttaaagtcatatatctaaaaaatgaaatcacacatgtacattatcaagaaacgattgaaaactgtaaaagagttgctttaccgattgatggctctgttaatatgcaaaatcctaaagttgtttttgcaataaccaaaatagaagatacatggtattttggaatttatcatgatgaagtgaattggagtgatcattatgaaaaaccacattcttattctcattctttaaatttaagagatgcaagaacaatcgttaatatagcagttggaaatgatttatctttaaaagtcattgatccttgttgtggagtaggaactgttgttttagaagctttaagtatgggaattgatattgaaggttatgatattaatcgttatgtttcttatcaggcaagacttaatttagaacattatggttatgatccattagtgatacaaaaacaagatatgttaacgattgataaaaaatatgatgtgacgataatagatattccttatggtgtctatagtcctttttcctatgaacaacaacttgaacttttaaaaggaacattatcattagctccaaagcttttacttgtttcacatattcctatgaatcaagaattagaagctatgggatataccattttagatcaggcaatgattaaaaaaggaaattttcaaagatacatgacgctatgctttcaaaaagcgatataattcgttataataaaagcgaggtgaggggaatgaagcatatttttatgatgaaatatacaaaaaaacatcatgattttgagagttgtattcatgaggttatgagtggatatgattatgaggttgtttatcgtaactgtttggctgatagtcaaaaatatgtaagaaatgtaaaagaaaaggcaagattttatatagctggtggagatggtacaattcatggcttgattcaatgtttgattgatactgaacatgagattgtcgttttaccaatggggacaggaaatgatttttgtcggactctaacatccatgaaaaaaccaaaagaaattcttgaagaatctttgcaatatggaacacaaaaagtcgacgctattgctttaaatgatacatattatatcaatgctgcttgttttggattagatagtgtaattgctaatcacgtgcatgatacccctaatattccacttgtaccagattcaaaaagctatatcatatcgattttacaaaatacaatgaaatataaagatcatagtgtcactatttatagtgatggaaaattattgtatcaaggtaatatgattttatgtactttgaataatgcacaatattatggtgggggatttcaaattattccacatgctgatattcaagatggttatatggatatttgtgttgttgatcaagtaccgaaatggaagattccctatatggttgaacgtttagtaagacataaattaaatgggcgtaaagatgttcattatttccaggtaaaaaatgcaaaagtcatttgtcaatatgcttgtaatattgatggtgaagaaaaacaatatgatcattatgattttcaaatcaaaccagagtgtttaaatattgtaacatttaaaaaaccaagcaattaagcttggttttcatattcttcagcaaagaaaacttgatgccataaagagaaacaataaacagtccaaatcttcttataataatcatgtttttgatttttgtgatcttctaacatagaaattaatttttgatcatcaaataattttttaataattggagtttgtaaaccagcatagactttttgataaagatcttcttctctcatccattctcttaaaggaactgggaatccaagtttctttttcttataagcttcattaggaatgacttttctagctgcttctcttaataaaactttggtattttcaggagttactttctgattatcttttaacatacttgctacatgaaagacttctttatcagtaaaaggaacacgactttcaattgaatgcgccattgtcatcttatcacctttttgtaagatatctttaataaaccatgtttgtaaatcaaaagcttgtcttttttgaatatttgtagcgtgcccttgatttttaaagatatcaccaacaatttcctgatgagaatggaaatgacttgtgtctcttaataaatgcttacaatcattttcagagaaaacaggattaacacctacataataatcttcaacacgttcaccatttctaatcaagaaaggaatacctttcacagttggcaaatgtttacagattttagaaatcaaatgacgaatcccaaaaggaatcttaccatagaatccactatcaatatctccacgatatgtattatatccaccaaagaactcgtcagccccttcaccagataaaacaactttaacatcatgactagcaagttcactcacaaaatacaaggcaacagcagcgggatcagctgttggttcatctaagtgatacataatctttggtaaaacatttaaatattcttctttactaataatcttactcttattttcaatacctaattgctgtgttaaatctttagcataaccaatttcattatatctttcatcattatatccaacagtataagtatgttgtggtcttgcaagtgaaacaagatatgatgaatcaataccactacttaaaaatgatccaacttcaacatcagcaagtaaatggtgtttgactgaatctttcattatttgatcaatagcttcaaccatttcttgattactcttatattgatcagcaaattgaatagaataataacgtttcatttcaatcttttgatctttataaataaaataatgtccaggtaacaactgttttacattcttaaagaatgtattttcaccggatacaaaattcatttttaaataaatatccaaaacatctgtatttaattctttcttaaaatcaggatgatctaagaaactcttaatttcactaccaaataacaaatgttctttatcatagtaataataaaaaggtttaattccaaaatggtctctagcacagaataattcatgagttgaagtatcatataaagcaaaagcaaacatacctcttaaataattcacaatttcataacgatattcttcaaaaccatgtaacaatacttctgtatcactattagttttaaaatgatgacctttttcttctaattcttttcttaattctaaatagttatatatctccccattaaaaacaactacaagatgatttgttttcataggttgattcccaccagctaaatcaataatagataaacgacgatgtcctaaagcaacattttcatcaatatattgaccttcaccatcaggtcctctatgcgcaatacgctccatcattttctttaagacttcaggagcattttcattaactggagcaaatcctactattccacacatttatatcacatcctttgcgaaagcattataccattttttttagactaggtgtaaaaaatattaaaaataaatgaaaagaggattttactcctcattaacatcaacatacaactctacataaccacatgatttacaaacagcagcctttaagggaaattccttttttttaaggtcctctttcttttccacaacaacaaaatcactaattgcttgagccgtatctttgacataacaatcttctttcatttccttatgacaccttggacattttctcacttttcttcacctctacatattattatacagaaaataagacttaaaacaaacatcaaaaagaaaatatataaaatcttttacaaaagggataatatgatataatcaatgtaatataaggagaagcaaatgaatacaaaaatttatgaatttgatgcagttattcaaaaagttcccaatatagatggagcttatatagaatttccctatgatgttaaaaaagaatttggcaaaggacgagtgaaagtcacagcaacttttgatcatgttatttatcaagggagtttagtacgaatgaaaacaccagggcatattattgggttacgtaaagatatacgtgcgcaaattcaaaaacagcctggagatattgttcatgtgaaaattcaagaaagagaatgataggtatgaaattattgttgatatatttggtgattatgaatgtgattggttttataatgatggcagtggataaatataaagctaaacatcatgcatggcgtataaatgaaaaggcatttttcttgattagtcttataggtggaagtttagggacaatcataggaatgtatacttttcatcataagacaaaacattggtattttgtttatggattaccaattattttgttaggacaagtgggattatggattctatatcttaggtgtttataagatgagaatgattgtggaggtcaagcttgcttttataaataaaaagtgttaatctaaaggtagttatatgactgacggaagtggaattgaccacaggaaatataatgttaagagccgaccgtctgggcaaagagtccagattgcggctctttttcaataaatcgatgaggaggaaaaataatgaaggagttagaattaaagtatggatgtaatcctaatcaaaaaccagcaagggtttatatgaaagatggtgaattacctattcaaatcttaaatggaaaagctgggtatattaacttattggatgcattcaatagctggcaattggttaaagaattaaaagaagctacaggattacctagtgctgcaagttttaaacatgtttctccagctggagcggctgtatatgttccattagatgagacattagaaaagatttattttactgaaggtttaaaattatctccgattgctgtggcatatgtgagagcacgtggaagtgatcgtatgtctagttatggtgactttgcagctttaagtgatgaatgtgatgaatcatgtgcaagatatttgtcaagagaagtgagtgatggagttattgccccttcttatacaaaagaagccttagagattttaaagaaaaagaaaaaagggaattatttggtaattcaaattgatcctgattacgtacctaatgagattgaaacaaaagatgtttttggtataacttttgaacaaggaagaaacaatgcaaaaatcacagaagatttatttgaagatattccaacacaaaataaagaattacctaaaggggcaaaacgagatttattaatctcaatgattactttaaaatatacgcaatccaattcagtatgctatgtgaaagatggacaagcgatagggattggagctggtcaacaatcacgtattcattgtacaagacttgctggtagtaaagctgatacttggtatttacgccaacatccaaaagttttaaacttaccatttaaagataagattcgtcgtgctgatcgtgataacacaattgatgtctatatgtcagatgattatgaagatgtcttaagtgatggaatgtggcaacagttttttactgaacagcccatccctcttactagagaagaaaagaaagaatggttagccactttaacagatgtttctttaggttcagatgcgttcttcccatttggggataatattgaacgcgctcataaaagtggagtgaaatatgtagctcaggcaggtggaagcatcagagatgaccatgtgattgaaacatgtgataaatatcagattgttatggcttgtacacatcttcgtttatttcatcattaaaaaatatctttgaaaattttgttatagatattataattgggataggaatatattttggcataggagaatgagtatggatgaaaaattaatgatgataaaagagctgtgtcttaaagaaacgagtaaggatccaatagaaattgctgtgaaaatgatgaagaatgaaatgattcatatgcatggaccagaacatcatattttagatggttcggctttattgactgcaattcataatgttgaaccaagttttgatttggcgacggctttagatgaacttgcaaatcgtggtttaaagatgccaggggcaacatgtggacaatggggaatctgtggttcggcttcatcaataggggcagctttagcaattattcatgaaactggacctttatcaaataatgaatattataaggataatatgcgtctaacttcgcaagctttaagtcatattggtgaaattggaggatcaagatgttgtaagagaaatgcttttctttctttacaaacagcgatagcttttgtgaaagataaatatggtatcgaattagcaagtcatcaagttgaatgtgaattttctcatagaaataaacaatgtattaaagaacgttgtccatttcataaaaaataataaaaaggaaataagcccatgatatctagcaaatgagcttgtttccttttttctaacatcaaaaaaccgttattttccatttttttagacagaatatgtgttataatgaggacaggatggtgataagatgataaaactcgaaaatgttacaaaagtttataaaactggcgtaagagccgttaacaatatgaatgtcaatattggtcctggtgaatttgtttatgtaattggacctactggagcaggaaaatctacttttattaagttattatatagagaagaaaaagcaacttctggtaaagttattgttgctggagaggatgtttctaagattaaagatcgtaaggttccttattttagaagaaatatcggaattgtctttcaaaactttagacttttaccaaaaaagactgtttttgaaaacattgcttttgctttagaggtaactgatacacctaaagtagaaattagaaaaaaggtcagaagaacattagaacttgttggtcttgaagataaagctaatgcttttccacatgaattatctggtggacaacaacaacgtgttgcaatcgcaagagctatcgttaataatcctaaagttttaattgctgatgaaccaacaggaaaccttgatcctgatacatctgtagaaatcattgaacttctagaacggattaatgaagtgaatcatacaacaatcttagttgttacgcatgataaagaaattgttcaaaaatacaagaaaagaacaatcttaattgaagatggatgcattaaaacagatacaagtgtaggaggttatgtagatggagttcattagttgtgtaaaaaactttccaaaacactgtaaaacagcttttcaaaatatttggagaaatggtgttatgtctgtttcatctatttttgctgtgacaattacattgattttgattgctgtgattggtgttattgcgattaatattcaagatatgacttatagtattgaagataatttaacgatttatgccaaggttgatcgtgaattaacggataaacaagcacaaaaaattcaaccacaaattgaaaagattgcaggagttaaaaaagttacattttcttctaaagcagatgaattagataaaatgattgctcaacaagatgatgatggtaaaaaattatttgaaacatatcgtaagaacaatcctcttggtgcagcttttgttgtagaagtaaaagatgctaaacatattgataatgttgctagtcagattggtgatattgaacatatcaatgaacctcaatatggtggaagttcaacaaattcattagtcaacagtttagaggctgtgcgtaatggaggagctatctttgttgtcgggttaactgttgtagctttatttatgattgcgaatacaattaagattacaattacttcaagacaaacagaaataagtattatgcgtatggttggagcaagcaactggtatattcgtttgccatatatgttagaaggaatctttattggaattattggagcaattattcctatcttagttgtttattttggttataatttcttctatgagagtgcttcaacatttttacctgtgatgttttctttaagagaaccttatccatttatttggcaatgtgctggtttattagttggattaggtagtggtgttggtttaattggaagttttgtttcagtaagaaaattcttgaaattctagatgagtctataggctcatctttttttgactataaatatcatcatagataaattgcaaatagtatgaattatcgatataataaaaatatcgaggtatgagtatggaaaatttatgtaaaatattagttgttgatgatgaatttattataagacaaggaattattcattttgttgattggaaaaaagaaggatttgaaatcataggggaagcaagtaatggaaaagaagctttggagattattgaaaaaatgaaaccacatattattttatgtgatattgttatgccagtaatggatggaattgaattatctgaggtaattaaaaatcaatatccagatatcaaaataattgttttaagtagttatagtgattttgataatgtaaaaaagatgtttttaaatggtgcatctgactatattttaaaaccaacattaaatcaaaaaacattgatggattctttacataaggttgtaaaacaaatgaaagatgtttctattgaaacaaaacaagaattatcattaacagattatttatcacagcttatgtctggttttcatgtatcacaatctcttaatcatccttttttaaaacaaacctatttttatttactagcaattagttgtaagggtgatataaaaaaacaggatatcaaaaaaactttagaaaataacataaattcatatcatcaagaaaatgtttatttattaaaatcatctgatgatgttttagtaatgattttaggttttaaatatcttcctgaaattgaaaacctagctcataaattttttatgaaaaatattgattatcattattttgtcttgagtgattatttttgtgatatctctttattacaatccatatatcaaaatcaaatcttatcaagtttaaagaaaactttttatttaaaagatgaatatcttatgacttctcaaaatattccacaaactattgaaccacttaaatttgatgttcatgaatatagtgaatatctttatatgatgaaactttatgaagctattgatttattaaaacaatatacgaaaacttcattattaaagcatgttgatgaacaatcactaaaatcaattgtagataatgctttatataatttcatatcagtattagaagaacataacttagatccagaatatatccgtaattttaaattatcaactttaagcactttagattcatgtaaacaatatgaagaatattatcatcattttatccaaatacttcatgatcttaaaacaattgtagataattaccaaatagaacttaatcaagatgttatgaaacaaattattcaatatctttataaacattatcaagaaccattaacactttatgatttagcggattattttaattttaattatagttatctttcttcctatttcaatgaaagatctgatttatcttttaatgaaaaattaaatactttctcaaaagtggcggaaaatcaagggcttaagccactttgagaggaaaaacagttgagttttactacacatttactacaaacgaagagccttgtttatgacaaactaaaaatatgccaatccctataccgcaggtactcgaaaagttaggattgacataaacagaatatacaaaagggatatttcattcattcgtattgaaatatcccttgattttttatattcgtgaagtactgtaattaacggcgagcaccgcagtcgcagtattcgtagtcgacataggtctcgttgtgaccatggtcttcctgatgggaacctacctgaacctgtttcgtttcgtagatggtttccatgcggtagttgtctggaagacctgcgaggatgagttccatagcgtggttttcagcgttggtgtcactcgtagtggtgtaaccgtcataggcgaagatgtaacgagttcctacagcgaccttctgtgtctcatagtcagggactgtcaccatgttggatacccacttctgtgcggtgtgctgtttccacgaatgctggtgagcaggctggctcggcttgtcggaaccgctgtttccagagtttccagaattggagctggaagtgtcttttttattggaatctgttgaactgttgttattatctttagtagttgaagtggtattggaattatccgtatttttatcggttttgctattttcgttttcttctttcttatcttcctcttccttattattgttttcttctgaaacatcaattttttgttccgtttgactttctgtttttttattatcacttggttttgaagcaaaagcaataccgattactagtgataatataattattaaaataattgcaattacaatttttttattcttacttatcatatttttaatttgttctaagttctttctttgtttcatacttctacactccttggattatgatatatctattttagcacattgtgaatatgtgcacaatatgatttctctcacaataattttataatcgaaaagaggagttgattgcgattataaattattatcctttgtgggaaaccatgaaaacaaaaggcatttcacaatataagttgctacaatcggggatagataaccgaacattggactcattgaagcacaataaaaatattacattgattacgcttgaaaaattatgtaacattttagattgtactccaaacgatattgtcgcattcgataaagaagctcaatctaatactcattttaaataatagtgaaatcttgtcaatcaataggtattctgattcaaactgtcagaatacctatttttatttatcttgctctttaggtatacaataggcttcaatcggattttccagtctccatagactttcttcaacatttacatcagtataattcgtaccgcttatactcgctttagtttccatatcgtcaaacaataattcttcatcaatcggcttaaaatatcttaaaaataaggcttcaatcattatatcgtgttttttcttttgcacctcttcaaaggaacaaaatgtcataatttcatttgaatattcattcaattcaattaatgcttgagtttcgttctcaatacgtttatgtactttatcatgcaattcaataacagcgtttagttttttatcagtcttttctttatttttttctccgctattacgaaagctacaacttaatagataagtacataagtcataatgtgttacaagcattttcctttcttcgcttgtaaacaaatgctccttattttttccgacattggaacattcccatagattagaagttactcctttttgagtgatgggttctttcaaacaaagtttcttgatttttttaacaatcaatgttctatctaccaaaccttcatcaaaatcatatctctctataatttcatcaataatctttctcattggtacatttctattgtctgccataatccctctccttttatgttcctattttcgattttataattcctattataaccattaaatgctataaaatcaatgatattttgcttatttaataattcctatttcctcgtaaaaaagtgccaatcaccatataatattaggtgtaaaaggcaagagcggtcttctgtgatttttcagaccttttacaaatatattcagaaaggaggcgtgagcatggctttgcaatgtttgaaccagtttgagtcgtttgaaatcaaaccctttcttgcagataaggatttatgttttgtcgacaagaaagaatggaaagattatcagacgaagaaacatcttggattcaagtttacatttgtaattctcagagatgataccaagtatcagcaaacgggtaatacaatcaagaccaatcgttatgaaaagattgatgtcaaagtagcgcatgatgtaaatattacacttgatgacttggtcgaacttgtcaatcctacagcgagagtctacggtgattaccgtaatcagctgagcattacttgcgatgacatcaaagttatttcaagcaagacgcagacagtaccgacaggtacagcaagacccactttaagaaaggagatgtaatgtatgagtcttgatagaagaattaagtttcttatagtacttatttcttcaatccttgtctgtggagttatcgggctggcaatggcaattgtcctgccagcccataacttcccgatagggattgaagtaatcaaaaaaataggatttatctttattgcattatcagttattcagattttgatttatctcatctattggtttttttaccacaagggatataaaggtatgagatatgcctttgtacacgctaatatgatgagaaagcttcgtcttatgatattagaagcaagttccaaacatacgacacaggaatatgcaggagaggagagagttgcaaaactcccacgcattcaaatcatatttgatgacggcatgaccagaggaaaagtcattataggaaattccatacgtcatcataagctgttagaagatatgaacatatcttctgcattaggaaagtatatcgtttctgaacagtatttttctgatgatatgaatacatatgtctatgaatttgaacttgcagaaacagaccagcttgcttttaagaattacaaagattttcagttgttatgttccaagcaagaaaacggaacattgttcattgacgatagaaatagagttccactacaccatacacttattgtaggttcgacaggttcaggaaagacatatgcaacatattcgttgattttacagttgttgaatttttcgactgtaccagagatatattttgcagacccaaaatgttctgctttatacgtggttggtaagtctatctcatgtgacaaaacagctggaagtgccaatgaaattgtattcctgcttcagcgtttctatgaagcaatgcaaaagcgtgaacaggaagcacaagagtatcttaacaataaacttgacagtgattttaaggactggggtctgcaggctcacgtcttgattattgatgagttttcttcattccagtctgtagtaaatacccttgataaatttacaagagacagggtcaatatgtatctgacaaatattattcagaaaggcagacagctcggcttcttcatgtggataatcatgcagaaatcagacagcaagatattgccaacatatcttcgtgacaatcttgttttcaaggtcgtgctcggacaggctactgatacgacttatcagacagcctttgaagaatacgctgatctgccgaagcggaattttcagcaagggcaaggcttatatacgttccaaggtttgacaaggcaaccgaaagtgtgttcattcccgaccttgaagtttgatattcttaaagctgtccgtactcggtagataactcattctgcgggggttatgtaataacccccgcagaacaagaataagaaccaaatacaaagaacaggaaaggaaaaatttatgaaatataaatctaccgtgaaagttggtatagatgaaatcacacttgtactgtttccaaatgaaaaagtccccccagatgaatggataatcaaagcagatgaaatactgggaagatttatcgatttatcaaagattgaagaattgttcggaaaaatgcaagaggctcaatatggcgttcagcaaggctatagtgcaggactgacctttgaaaacaaaccttggcacatgagcatatcatggcatgaatacttgcagactatgggtatctgcataaaattttccgcttatgcttggtcggtatatcagtctactttttttgaaagatatggtaagagaatgaacattgctttatttctgaaaatgatacaaagtgatttctatatagcaagactttctaggattgatatgactgctgattatttcaactttcataaatgtttcaatcctaacacgatatatcagaacttgaaaagcggttcaattattgtcaaagactataagaaccgcagtatgataaaaacattcaatggagttgataaaaacggcattatctctaccttatatgtcggctcgaggaaatcgaatacaagatgttttacacgcatatacgataaaaaagcagagcagattgaaacaaaagggtttcgatatgaagaagcaatcaattgcaaaagctggatacgtcaggaagtcgtatttaagggaacttatgcacaccaaattacagaagaattattgaatattactgatgaaaaagaacttgtgcaatttatcgcacatcagattacagatagatacagattttatgatatacagactaaaaaagaaatgaaatatacaagagcacttctctatattatgaataacgctcagttcaatcatttatcaactgcaatcgcaaaagataatgaccttaagcgttcaataatatatcttctgaaaggttcgggattatgtcccacattttataaagcttttgaagtatggggagaaggtgcagacaaagaaattgcaaattatctttttgaatattatgaaaagttttacataccagaagcgaatcaaaaaaaggaaataaagtcatggataaagaaacacagaagcacattaagacagcagaccataacggaatatctgaaaggagtgtgggtatgatgaagaacactgttgttcctgtttgggaaaaatatatgcttacaatagaagaagcaagcaaatattttggtataggcgaaaataagcttcggcggattgtagatgaacataggggtgaaccatttatcttctacaacggacaaagaacccttatcaaaaggaaacagtttgaaaatgtgttgaatgaaatcgacaccatatagaaaaagagccttgaacatgatatactgaaaacagtcatattcaaggctctttccataaatgaaaggagttaaaagtatggaaaagagaaccgacaataaaggaagaatattaagaaacggagagagccaaagaaaagacggtagatatgcttacaaatatatagaaaacggtaaacctaaatttgtctattcctggaaactggtatctactgatagagtaccaaaaggaaaaagagattgtgtttcacttcgtgaaaaagtcaaaatgatagaaaaagatttatctgacggtattagtacctcaaacagaaacatgacagtatcacagctatatgaccgttatacaagaagcaaggcaaatgttagaaaaggtacacagactggcagaaaataccttaaagaagccttgcaaacagatattctggggaatatgagcattgataaggtaaaactatcagaagccaaagcatgggcatatagaatgagagaaaaatatgcttacagtacagtaaagaatatgaaaagaagcctgaatgctacctttcatcttgcgatacaggacgatttgcttagaaaaaatccttttgattttgctttgacggatgttattgaaaatgacaccaaaaagaaagaagcactgacaaaggaagagataaaagcacttcttgattttgcaaaaacagataaaacctataaagtctattatcctgcaatcgttattttattaaatacaggtttgcgtatctctgaattatgcggattgacgctttctgacattgattttgataatcgcacaattgatattaaccaccaattgaaaaaggataaagacggatactatacagaaccaccgaaaagtgtcagcggttatcgcaagatacctatgacagacttggtatttcaaactttgctggaagttataaaaaatagaaaaaatacacagcctattgttgttgacggttatagcgatttcctctttttgaacaggcagggattacctatgtataacgcatactattcatgtagattttcagcactttcaaaaaagtatcgtaaatatacaggaaaagaacttcctaatatcacaccgcatattttaagacatactttttgtacgaacatggcaaacaaaggaatgacgccaaataatctacagtatgttatggggcataagaatattactatgacactaggatattatgcacatggaagttatcaatcagcacaagccgaaatgaaacgattgactgcataatctactactaaatttactactttttagaacgttaaaaagtgatagtttaagccaaaatataaagcaatttaccgaataaaaaaatgagaaaccctcataaaataaggctttaagacgatatgtgaagttttaagccttattgtaaaaattcattttatgtttattacaatgtttaaataagatcagaatacaaaaagctgcagaaatgttacaagataaacaatataatattcaagaaataggtcaaatggttggtttttctgatcatagttacttttgtaaggcctttaagaaattaatgaatgtaacacctagtcaatatcgaaaaggactgatgaaaaaatgatccaaaagataaaagattatatccaatatcataagtttttctttactattagtatcattactacagtatgtgttattgcagtgactttatttgtttcatactttgtaattcaaatgtcagtagatgtttatttagaagcttatagtgattctaataaaaagattatttatcaaatcagagatgattattatgaacttcatagtgatgtcgttaatgttttatcaaattgtcaaaataaccaagctctttatcaatactttacgaataatgacttaacttcagcccaagaaagccattatatttatacaatggcttcgcagttagaacaatatggagttttacacaataacattagttctaatctattgttggtaggttttaatcaaaaaaaatattgccccaatagtttagggggaattgatgattatcaagaaataatgcaaagtgaagttgttaaaaaagctttagaaaatcctcgagagattatctatcaatacgcacaggatggttttggacaaaatcttaaaaaacatgatgttattattgcgattaaggttttaaggaatgttgatacaaaacaaaattatggcttggcaattgttatgttagatcaaagagattttgcttcttattatacaaatctgattgatgagcatattaatgaaatttatattgtagatgaacaacaaaaaattatttcaagtaatcatgcgaactatattggaaagatagatcaaagtctccaagctgtctttaagaagaaagaagattcttctcaaaaagtcaatggtaggaagtattctgtcagctatacaaacatgccttttatggattcacaatttgtaagtatgattgatgaaacaggtttaattgaacaaattaactttattccttctgtttttatgattggtttagttgtcttaatgattgctattacgattactcttatcttatttagaaaatcatttgaaccgttaaatgttatgatgaaacagattccagctattacccagggggattttgagcatcatgtagaggtatcaggaagtggtgaaattcaggagttaagtcgggcttttaatacaatgatggatggtttaaaggaatatgttgatcgtgttgtgaaattgcaggaagaaaagcgtttagtggaaattagagctttacaaatgcagattaatccacattttgtttataatactttaacatctattaaattcttaatttggcaaaagaataatcaattagcaattgaagcgattgaagcctttattcaattgttaagaaatactttaagtcatcatgatgaatatgtcatgattgatgaagaaatagaaaatttaaagaattatgtaaagattcaaaatattcgctataataataaaattattgcaacctatgatattgatcaaagctgtcacgatttaatgatattaaaaatgcttttacaaccttttattgaaaatgctatctttcatgcttttaatgaacaggaagttggaacaatcaaagtttttgttaaggttattaaaaatcaattaacgattgaaattatagataatggaattggtatgagtgaagatgaagtgaatcagctgttaagtggtgaagctgatcaacataagaatttttcaggaattggagtgaataatgttaataaacgaattaagttattatatggagaaggttttggtgtcaaaataaatagtatagtttctcaaggaacaatcgtttcaattgttttacctgtgcttgttaaagaagatgttatggttgaaaaactgtaacatttttttgattttggtaattattttggattgatgtatcatggaaaatagtaatttttttagttcatagaacatgtttttggacttaggggtgattcgttgacaccgcttacataagcgattatagttataagtggaaatgatcattgaccgtataaattattatttacaagggaggacaactgcatggcagggattacattaaaaaatgtaaaaaaggaatatgagggtggtgttgttgcaattgaaggccttaatcttgagattaaggataaggaatttatggtattagttggaccgtcaggatgtggaaaatcaacgacattaagaatgattgctggacttgaagaaatcagcgatggagaactttatattggtgaaagactttgtaatgatgtagcaccaaaagatcgtgatattgcaatggttttccaaaattatgctttatatcctcatatgagtgtttataagaatatggcatttggattaatgcaacgaaaggtccctaaggaagaaattgatgaaaaggttcaatgggcagccaagctcttaaatctagaggcttacttaaaacgtaaaccaaaagcgttatcagggggacaaagacaaagagttgctttaggtagagcaatggttcgtaatccatcagtattcttattggatgaaccattatctaacttggatgcaaagttacgtacagaaatgcgtgcacagatttctaaattgcatcaagaattgaaaacaacatttgtttatgtaacacatgatcaaactgaagctatgacaatggcagatcgtattgttgttatgaaagatggtgttattcaacaaattgatacaccacaaaatctttaccttcatcctgcaaatgtttttgttgctggattcataggttccccagaaatgaatatgtttgaggtcaaaattgaaaaagaaagtgatggttattacatcactaccaaagatcttcatttcatgattccagaaggtaaaataaataaaaatgaatttgaccaatatgtgaatcaaacagtgattttaggaattcgacctgaagatttacatgtcgaacaaatgatttttgatacttatccagatagtatttttgaaatcacagttgatttaattgaaatgactggttcagaaatgaatttatatttcaattatgaaaatcaagatatgattgttcgtacatcatctcgatttggattcaagaatggtcaaaaagaaaaagtagcaattgataaaaataaaattcatttatttgataaaacaactcaaaaatcaatattaaaataaaggagagaaaaataatgaacgtgaaaaaattcatgggtattggtttatcagcattaatggcattaagtttagttggctgtggtggtgataaaaaagaagcgaaaactgattcaggtaaattaacagtttgggcatgggatgaaacatttaatattaaggcagttaaagaagctgcaaagatttattcaaaagtagatgcagatacaaaaattgatgttgtgacaatggatcaagatgcaattgttcaaaaattgcatacaagcttatcttcagggaaaaccgatggtttaccagatattgtcttgattgaagattataagattcaaaactatttaacagcatatcctgattcttttgtagaattaactgatattgttaaagaagaagattttgatagttacaaattctcagtgaataaaattgataagaaaatttatggtgttccatttgattcaggagtagcagcattattctatcgtacagatatgattgaaaaagctggttatacaatgaaagatatggaaaacttaacttgggaaaaatacattgaaattggaaaagctgttaaagcaaaaactggtaaagaaatgttaactttagatccaagtgatattggtcaaattagaattatgatgcaatcagccggtagctggtatatgaaagaagatggaaaaactgttaacattaaagataatcaagctttaaaagatgcgattaagatttataaagatatgattgatgctggcattgttaaacaagtatcagattgggattcatttgtttcggctttccaacaaggtgaagttgcttctgtaccttctggatgttggattggaagttccgtcaaagcagctaaagatttatctggtaaatgggctgtaacacaaattccaagaatggcagctaatagtcaatcagtgaatgcttcaagtattggtggtggcggatggtatgtcatcaacaatggaaatagtgacaaagctaaagatttcttaaagaatacttttgcttcaagtgctgatttgatgaatactctcgctaatgaaattaacttagtttctacattaaaagcttctaaaaatacagaaaattataaagctaataatgaatacttctctaaccaaccaatttttgaaatgatgtcagaatggtctggaaaagttcctgcagttaattatggtttacacacttatgctattgaagatgtaatgacagaagctgttcaatctatccttaaaggagcggatttggataagactttaaaagatgcacaaactcaagcagaaggtgcagtcgttgattaatggatgctgatgtagacactgccaagcagtgtctacatttaaaaaggggggcttaatttgaagctgaaaaagaaaaaaggaaatggattaagcactttagaaaatcgttatggctgggggtttattacaccaagtacgattcttattactattttagtgtttattcctatgatccaagcatttataacgtctttacaaagtggacttgctaataatttaagatttgttggtattgaaaattatattcgattattaagtgatcagacatttttaaaagcagctggtaatacattcttatatttgattattcaagttccgattatgattattttatcattaattatagccgcaacattaaatgataaaaaattaaagtttaaaggattctttagaattgctatatttttaccttgtattacatcattagttgcttattcaatcattatgaaaagtttatttgctaatgatgggattatgaatcaattgttattaaatttaaatttaatatcatcacctattcaatgggttactgattctctatttgctaaaattttaattatcattgccattacctggcgttggacaggttataatatgattttctatttatctggtatgcaaaatattgatccttcaatatatgaagcagcagaaatagatggggcttcaacatttacaaaatttactaaaattacaatcccaatgttaaagccaattatcttatttacaaccattacttcaaccattggaacccttcaattatttgatgaagttgtcaatattacaggtggtggaccagcgaatgcaacaattacattatcgcaatatatttataatttaagttttaaatattctcctaactttggatatgccgccgctgttgcgtttgtaattgttattgcaattgttattttatcaattattcaaatgaaagtaggaggtaaggacaatgactaaaaaacgcattttaagaattttaaaatatgttatgttatctattttggcacttatctcaatattcccatttatttggatgttgcttggaatgacaaataatacagttgatattacagctggaaaattaaaaattggtggtgagtttttaaataatttaagtcatttgtttgcctctgatttagattttatatcagcaattggaaactcagcattagttgcggttattacaacagtcttggccttattaatctcatcagccgcaggatatggttttgaaatatataaaacaaagaaaagagaacgtcttttcaacatactccttttaagcatgatggtaccatttgctgcgttgatgattcctttattcaagatgtttagtaatgtttctcaattgggattagattttatgggtattgattcattgttttcgttgataattccttcggtatcaacggccttcctgatattcttttttagacaaaataccaaatcttttcccaaagaaatgttagaagctgccagaattgatggagtaagtgaaatcggtttgttctttaaaatatatatgcctaccatcaaaagcacatatgctgcagcagcaattattacatttatgaatagttggaacaattatatttggccattgatatctatccaaacaccagaaaaacgtacaattccattaatcttatcagcaatgggggcttcttatactccagattatggaatgattatgtgtgcaattgttattgcgactatcccaaccgcaattatcttcatggttatgcaaaaacaatttgttgctggtatgattggttcagtaaaataatgtgaataaaggtcatccattttgtgatgatctttatgcagtcatgaggtgaaataatgtcattagaagaaaatatgaaaaatggaaagatgtttagagaatatgggcacagtgatcctaaagatattgcttatgctaaaaagcttgaaacattaagaattacatgtaaagataaagtttttgaatataatcatacaattccaagcttacaagataccaaaaaagctatattaaaagatttattaggggattgtggagaacatatttggattgaagctccaatgttctttgcttatggatgtcatacccatattggtgattacttttatgctaattgccatttaacaattatcgatgatgtagatgtttatattggtgatcatgtgatgtttggtccaaatgtaacaattactgtaacaggacatccattagataaagactatcgtttaaaagctgctcattatagtgagacagtaacgattgggaataatgtgtggattggagcaaatgctgtgattttacccggcgtaagtattggcgacaatagtgtgattggagctggaagtatcgtgactcatgatatccctgcttctcatttggcttatggaaatccttgtcgtgtgataagagagattaatgaatatgataaagtctatttccgaaaaggaaaaaaggtgaatgaagattggtaaataggaggtttatatgaaagcagatttaagttggttagaaaatccagaaatatttcaggttaatcgattggagccatactctgatcataaatattatttaagtattgagaatgctttgaaatcagaagaaatggaattgaagcaatctttgaatgggagatggtattttagttttgctaaaaatccatcagagagaattgttgatttttataaattggattatgattgtcatcattttgatatgattgatgtgccaggacatattcaaatgcaaggctatgaccatatgcaatatatcaatacgttatatccttgggatggtcatgaaagattaagaccaccacatatttctttaacagataatccagttggaagttatgtccgttattttgaagtgaatgaaaatttaatcaatcaacaaacttatttaagatttgaaggtgttgaaacagctttttatgtttggttaaatggtgaatttgtaggttatagtgaagattcttttacaccttcaacatttgatattactaactatttaatagctggaaagaataaattagctgttgaggtttataagcgaagtagtgcgagttggctggaggatcaggatttttggcgcttttcaggaatttttagggatgttagtttgtatggcattccacaagttcatgttcaagatatgtttgttaaaagtgaattatttaatcaatatcaagaggcaaatatttatgtggatttaaagatgaaagatgttcaaccattttattgtacggtttctctttacgatgcaaatatgaagcctttatacaaaatacaaaagtgtaatcattcatgttttgacatgagtttaaaagatattcatttatggtcttgtgaaaatccatacttatatttactattaatagaagtttatgatgaaaataaacaattacaagaagtgattccacaaaaaattggtttaagagaatttaagatggataatggtgttatgaaattgaatggaaaacgtattatttttagaggggttaatcgtcatgaattttctcatgttaaaggacgtgctattaccaaagaagatatgttgtttgatattcagtttatgaaaacacataatattaatgctgttagaacatcacattatccaaatcaatcattatggtatgatttatgtgatgaatatggtatttatttaatagatgaaacgaatttagaaagtcatggctcttggcaaaagttaggtgcatgtgaaccttcttggaatgtaccaggtaattatccacaatggaaggcagctgtattagatcgtgcaaaaagtatgcttgaaagagataaaaatcatccatctattcttatctggtcttgtgggaatgaatcttatgctggaacaaacattgttgagatggctcatttctttagaacaagggatacatcaagacttgttcattatgagggatgtgtatggaatcgagattatagtgatgcgacagatatggaatcaagaatgtatgccaaagctcaggaaattgaagaatatttaagaaattctccaaaaaagccatatattagttgtgaatatatgcatgcgatgggaaattctttaggtggaatggaaaaatatgttgaactagaagatcgatatgaacagtatcaaggtggatttatttgggattatattgatcaggcggtagagtatacaaatcaatatggtgaaaaagtattaggttatggaggagattttaaagatcgttatacagattacaatttctgtggtgatggtattatttttgctaatcgtacactttctccaaaagctcaagaagtcaaatatttgtaccaagatattatgcttgaaccaacaaaagatggtgtattgattcataataaaatgttatttgaatcaactcaaaagtatcaatttgtttatcaaatgaagcaaggtgatcaagttattcaacaaggtgaaatagatattgatattgcccctggaaaaaaacaggaaatccatattccttggttaacgcatactcaaggtgaagtgataaaaaccgtgagtgcccaattaaaacaagatacattatgggcaaaaaaaggatttgaagtagcttttggacaaataacagaaggaaaatatcaagcattagaagtagaagaaaaaccactcactattgtagaaggggatggaaatattggagtacgatataatgactttgaagcattatttgcgaacaatgaaggtcttatatcattaaaatatgcccaacaagaattcatatcaagagcacctcgtcctgtctttagccgtgctgctacagacaatgaacatggatatggtcatgattttgatagtgctatgtggtttagtgcttcaacattttatagatgtagtcaatttgattatgtaattaatgacaatcatagtgaaatcgatgtacattatgaatatactttaccagtttttcctatcacaactgtagatattcattttattgtacgttcaccaggtatcataaaagtagattacatttatcatggaaaagctcaattgcctgagatacctttacttggtatgtgttttaaattgtataatgaatatgatcgtttccaatatttaggacgtggtccattagaaaactatattgatcgaaaacaaggagcaaagattgatgtatatgaaagtctagttaaagataatatgtcaccatatttattgccacaagcttgcggcaatcgttgtgatgtccgctatgtagatgtcatgaatgcccaacatcaaggattacgtttcagtatgattgagacaccatttgaaatgacagtcctaccatatagtctacaaatgttagaaagcgtgatgcatcaagaagaacttccaaaatcatacttcacttatgttacaattatggctaaacaaatgggtgttggtggagatgatagctggggtgctccagttttagaagaatattgtataaaagctcataaagatgttcatttctcatttgaaataagtcgtgtttaatggatgtctaaaaatgaacagtttcaagggactatgctctttgaaattgttcattctttatgttatcaaataccattagcttcaaagtatggataagtctcttgagttaatatattttatgattaaaaaatataatcatagttatcacgattgaggcattatttggaattgtgactgctaagaatgttgctattgaaaatcttttgtataaagaataaaataagcttagcttattattttatgaaatatggaaaagagggtagtaatcatgaaaaaattaatattgattggaggtacaatgggagttggaaaaacggcaacttcctctttgttaaaatatcaattagataattgtgtttttttagatggtgattggtgttgggatatgcatccttttattgttgatgaagaaacaaaaacaatggtgatgaataatattgtttatcaattaaatcaatttattcattgttcaaagatagaaaatattatcttttgttgggtgatgcatcaacaaagtattatcgatgagcttttatcaagattagatgtatcaaattgtgaggtttatcctatttctttaatatgttcaaaagaagccttagaaaaacatattcaaaaagatattgatttaggaataagaaaagcagatgtgctaaaaagaagcgtagaaagactttctatgtatcatgatttaaatactattaaagttgatataacacatttaacaattgaacaaacagtagaaaaaatctgtgacataattcatgcctagtatgagaatcgtttgacttcaacatatattttcccatctttgacaatttataagcaataaaagtcctgaacccaatgtgtataaagggtttcaggactttttggttctgtaacgaatatgcgtaaattattatttctttgtattttttataatatttctcattttctttttgcttgtaatttcataatcggttctaaatccaaacttataatgcagctcatcggttaattgtgttcttgtgtatgctggaatatatccgttatactgtgtgtcaaccaattccatccctctaattgtctttaatatttctgtagctgtatatttattgtctaatatattagccaataagcgatagatgatgagtgacataaagcacgttagaaagtgtgcttctatcctttcttgtttttgtaagtgtactggtcttgccttaaaatcagttttcatgattctaaaacattcttctatttgccatctttcctctgaaacattgataatggcttggatatcatcatcttctagattagtagatactgcatagaaaccatcgtacattgcttcattatctatcttctcttgatttaaatgatagtattcttcaacagcgactccgttttcatcagtcgttattttttctataaatctggatggatcgttaggattacgtgttcctttttttaattttccgttagaacgtatcttattcatcgctctttggacttgcttatctctaatcttcttttgataaatagcatatttaggtgaatatgtaataattaatcgttccttgataggagattctataggcaattctttatagaatactctattgagattatcttcacaattaaattcaatatcatcaatattgattcttttagaactcttacttcccagttctaaaaatcccgtatgtctaagtgcgacttcacgatcatctttctttaatttttttaaagattgtgtaatgatataagctctattctgtatactattaaattgtttattcgtttgtgacgctaaaccgctgtcactgcagtaaacaaattgacctaattgaaaatccttaacgattctttcttcaagcggttttaatgtgacttgttcgttcttgtttccttcatataaatcaaaagccaagggtataccatcaccatccatcattaatcccatacctacgataggattaggtctgttttccttgcctttaccatacattctaaatccatcatcttcttcaatttcaaaataataatttgtacagtcataatatagcttactgccatctctcttcttaatgtaatttgtattcctgtaaagttcagattgtatatagtctgtttccttagaaagaatagataatgcacgataaatatcatgtaattcatatttaggcttttctaataaggtagaagcaaattcatagctagatcgtttactgctgggacatagaatcctagaatagattagatccgataagattgcatccaaatcatatttgaacttatatcttgctttaatgtttctacatatattgttgatttttaacttgtaataaatatcttgcagaaatagataaccgcaattatacttacgattactgtttggcttaataattctatcaggggagaaagcaatgatagtatcatgattatcatccttttctttttgagtaagttctttggcgtattgtttagcccaaatgatcaattcatcacgagacatattcttttctttacataagtcatctatcttacctaacttttcgtatgtctttgaagtacgtgaaccgttagaatatatatctttgataatataaataaattcatagttttttgatttactgatagtcactctcataatatagcctccaatacttataaatctattatatcatatattacgatgaattacgatataaaagtaataaaaagttgacaaaaaaataaagcatctatcaatgctttttgaattataaacatatttaactgtcaaagacccgtatcatgatttaaatactattaaagttgatataacacatttaacaattgaacaaacagtagaaaaaatctgtgacataattcatgcctagtatgagaatcgtttgacttcaacatatattttccttataataggtgatatgtaaaggcagggactagtatgtttacaaaaaaagaaatctttagtattccaaatattttgtgttattttagaattgcattagtaccagtgtttttgtatgcttattttactgcggaaacaagtgggggacattttttatcagctggaatacttatattatctagtttaagtgatttctttgatggttatattgctagaaaatatgatatgattactgaacttggtaaactgattgatcctgtagctgataaattaactcaatttgttgtggcatgtacacttatgtatacctatcctgcttatgcgtggttagttgcaattattgttttaaaggatggtatgttgttgtttgtaggatggtttatttatcgtaaaaaggggcgacatttggcacaagcagaaatgcctgggaagatcgcaacggctgtattctttgttgtttctatattattgattgctttctatatacctaatacaattgcatccactgtgatgatttattcaactgttgctttaatggcaatagcaatgatttattatggacaaggattatatcatttatataaagaagattagaaatcagcttatggctgattttttctatttcctcggcaataaacgacatataattatattattagcgaataaacatatatttcttgattgttttcttgtataataaaatcaggtgatgaacatgggaagtaatcgggaattaaaagaattatgttatatggaagcattagaggatagtgttgtttctgttgaaatgatattgaataggctgaatcaaattgaacaaaagaaaggtgtctttgatgcttatattttatcacatgatcgttctaaaactgttttggatttagaactctccttagcaacactttgtatattacttaggaaaatgtcagaaaatttatttattgtcacacctgaggaattaagacgggatatgaatagtattattcattccaatcgatttgagtatacgcgtttagaagttgttgtttattcacaaaaaggtagagagccaattgatttacaaggtttattgaatttttgtcatgcgattcttaagagtgacaaagttcgtagataatttatgatatagtcatcatggtgatgataatgaatttaagaaaaaatctaggtattattatgatgatgttaggtgttttgttgacaattaatcaaggtgaacaacaaaaggatttaataaaacaaattgaggtgatggtgaaaacatattggccattgatattgagttttattggaatttatatgatatctacaccagtgaaaagaagaaagtaatatgggttcttgtctatactgaggataggaactttctttgttttattgaataaaaatataaaaatctaaagtgtttttgacttatgtgaaaaaattcatcttataactttattttttggctataattttgtataatgagcgcatatggaggtatatgaaatgaaaaagagaccagtggttttatgtattttagatggttatggtttaactgaaagagttgatggaaatgctgtgaaattagcaaatacaccaaacttagatgatttaatggcaatgtatccaacaacaactcttaaagcaagtggaaatgcagtcggattaccagaaggacaaatgggaaatagtgaagttggacacttaaatattggtgctggtagaattgtttatcaatcattaactttaattaataaagctgttgaagatggaactttcttcacaaatgaaactttcttaaaagcaatcaatcatgccaaagaaaataattcaaaattacatatttggggattattatcaaatggtggtgttcactcatcaaatgaacatatctatgcattattaaaattagctaaagatcaaggtttagaaaaagtttatgtgcatgcattcttagatggtagagatgttgctcctgatagtggtgctgatttcgttcaagaattacaagataagatgaatgaaattggtgttggacaaatcgcttctatctctggtagatattatgctatggatagagataagagaatggatcgtgttgaattagcttataatgcattagttggtaaatctggagaaacatatagtgatccagttcaatatgttaaagattcatatgcaaaagaagtttacgatgaatttgttattcctggatacaatccagcaactgatggtgctgtaagcgataatgattctattatctttgctaactttagacctgatagagctattcaaatgtctaatgttttcactgctgatgtttatgaagattttaaaccagcagataaaccaacaaatattttctttgtatgtatgatgcgttatgctgatactgttaatggtgaaattgcattccattcattagatttaacaaatactttaggtgattacttatcagctcaaggtttgaaacaattaagaattgctgaaactgaaaaatatgctcacgttacattcttcatggatggtggagttgataaagaaatcgaaggagcaactcgtgttttaatcaattcaccaaaagttgccacttatgatttacaacctgaaatgagtgcttatgaagtgaaagatgcattacttgcagaattagataaagatattcatgatgttgtgattgtcaactttgcaaactgtgacatggttggacatactggaattattccagcagctattaaagcagtgagtgttgttgatgaatgtgttggtgaagtttatgaaaaagttcttgaattaggtggaactatgttaattactgctgatcatggaaatagtgaaagattattagatgaagatgataatccattcacagctcatacaacaaatccagtaccattaattcttacaaatacacatttagaattaagagaagatggtaaacttggagatttagctccaacaatcttacaattattaggattaccacaacctaaagaaatgactggagaaagtctattaaaataggagattctaaggaatctctttttttcttcttttgaatacataaatcttgtataataaaagaggtgatgaaacatgaatttaatagaacgtttaaaaaatcaagagaaaatgaatgaaactcaacaaagtattagtcaatatatattacaacatagtgaagaaatacctcaaatgagtgctcgaacactggctaaaaaaacttataccaatgcttcaacaattattagatttattaagaaattaggttatgagaattataatgattttaaagttcatctggttcgtgatttaaaggatgctcaattagaagatgtaaaaataagagaaaaagaaatgagtatttcaattattgataaaattagtgaattagaaaagaatgtcattgagaaaactaaaaatcaactttcagttcaacaattagaaagagttgctcaacattttcaaaagataacttatattgattttatcagtaatgatgcaaatacatgtttaggagattatggttgtcatttgttttttcttgctcaaaaaatagcaaccaattatacagcaacaaatttacaattatatttaacaatgacaccacttaaagatcatgctattgtgttgattagtcgtatgggtgaagataaaagagttgttaaggttgcccgtgaatttcgtaaaaaaggcgtttatacaattgcgattacagggagagtagaaagtactctagcaaagtgctgtgatgaggtgattccagctattcatattgattcatttgctgattttagggatatgatttttcaaatctctacacaatatatttttaattgtttattttctttgatgttaagtgataattatcgttcaattattgagtttaatgaagcttatggagaagtctatattaaataatgggttacattgttgcacttttcttgagaatttatttaaaatatggttacaatgttgcttttgattggataggtcttgaaaaaagttaaagaatttcttatgatagcgtcagttaaaggaggatgaaatcatgttacacaaaaaattaaaagcatttcctcaagattttctttggggagcaagtacatcagcttatcaagtcgaaggagctaatctagaagatggaaaaggtccatcatgtcaggatgttaaagaagtaccagaaggaacttcagatttaactgtctgtgctgatcaatatcatagatataaggaagatattgccttaatggcagaaatgggattcaagacttatcgtttctctatctcttggtctcgtatcattcctgaaggtactggagcagtcaatccaaaaggaattgaatactataacaatgtcatcaatgaatgtttgaaatatggaattgaaccattagtcactatgttccactttgatatgcctgcggcattagataaacgtggttcttggtctaatagagaatcagttgactggttcttaaacttcgctaaggttatgtatgaaaacttcggagacagagttaaatattggttaacaatcaatgaacaaaacatgttgactctagtaggaccagttattggaacattaacaatccctgaaggatgtacaaatgaattaaaggaaatctatcaacaaaatcaccatatgttagtcgcacaagcaaaagccatggcattatgccatgaaatgttaccaggagctaagattggaccagccccaaacatttcattagtctatccagcaagctgcaagccagaagataatctagcagcccaaaattataatgctattagaaactggttatacttagatatggcagtctatggtgtttataataacttagtatgggcatggttagaagaacatgatgcaacaccagaatttgctgaaggagatgaagaagcattaaagagtggacatccagacttcatcggattcaactactacaacacagcaacatgtgagtgggatgatggaagtgaagaattatcacaggcagtcgatcaacagacagcacgtggagaagcaggaatgttcaagggattcaagaatccaaacttgccaacaacagaattcggatgggaaattgatcctatgggattcagagcaactattcgtgaaatgtattcaagatatcgtttgccaatgatcgttacagaaaacggattaggagcttatgataaattaacagaagatggaaaagtccatgatcaatacagaattgaatacttaagaaaacatatcgaacaagtacaattagctattacagatggatgtgaaatgatgggatactgtccatggagtgcagtggacttaatttcaacacatgaaggaatggttaagagatatggattcatctatgtagatagagaagaatttgacttaaagacattagatagatatagaaaagattcattctattggtataaaaaagtcattgcaacaaatggggaagatttatcagattaggaataagaatttcttattccttttcttttgcctttgattatgatatatttaaacaaaatggagtgattcaatgaaaaaaataacttgttttttattaactatcttattactcgttggttgtcaaacaacgagtcaaagattaaagattgatggaatccaagaaattgagtatcaagagttaacacagaatttaaattcagatgttacatttatgttgtatattggtagacctgattgtggtgattgccaagaattctatccagtattagaaaaatatgtgacgagtcataaaggaacaggtctatattatttaaatgttaaagcatttagagatcgagcaaatcaaaaagatgcaactcaagaagaaaaagatttttataagaatctttatcaggaattagattttgattggacaccaacaattcatgttgtttctaatggacgttttataaaaacatatcagtatttagatgaagattattttaaaattaaggatagagaaaaacaattacaaagaaaacaagaatttttagatgaatttcaaagctttatggatgattatttcaaggaggattaagcaatgaagaaatgtcctagatgtggatatgaagttaaagatgatgaaaagtattgtccacattgtggtttagacttacaagttagatatcgaccaattaaacctaagaataaatcaatgacttatttattatatgtgattatattcttctcttttattactattcctttactttatggacgtattttaagtgatattggaagtagtatgaatgaaattggtgatgagaaaacaaagcttccagctattgttgatgaagaaccaacaaagattttagcaaattatgatacattagctgattttaagaatcagtttagtaatgttgatggaattgttcaatctattgctgattatgaaaagactttatttgcaattcatgattatacttttgataaggattataagattcaggttttagataattataatatctattatgatttcacttatacaacaaagattaatgaacatgttactttatcaattgaacgttattatgatcgtgctcatcaatataatgaagaaaagattgtttttaaaaaggataatgcacaaagttttgatgaattatttttaactgatgaacaaaaggctttatttgaaacgtatagtggtcctcaaacagttactaatcaattgatggatgattttgcaaaacgtcaagatgaatttgaaagtaagaagaaaactttaggacattatggaattggaaattataaaggtgaatcatcatttgttgttcatcgttatcaaaaaacatattattctgtattaacatatactcattctttaaaagattatatcaactagaggttctttaacctctttttctttgcttttattaatatattcgctataatatttaaaacaaagggggaatcatcttgaaaatattaataagtgatttagatggaacattggttaatgaaaatacaagtatatcacctaaaaatatcgaagcactcaaagaattaaaaaaacaaggtcatttgattgcgttatgtacaggacgtaattttatggaagttaaagaattaattgattgtgttgatttttcttatgattatttaattttaaataatgggggtcaaatcttagataagaatctaacaacactctatgaaaaacatattgaccatgaaattggtgttgatattttaaaacatttaacaagttatgctggaatgtgggcatattattgtgatggtcatgttaattatggttatatagatggtcaaacgattaatcatggggctaaggggaaacctaagattgatgttgattttcatcaagcttatcaacaagcatcacattttcaaattattgcctttaatcaagatgatgaaggtattgaaaatacaaaggcatgttatgattatattttagaaaattatagtgatagtgttgaagcttattttaatatgcattttgttgatgttgttcctaaggggtgttctaaaggaagtggaataaagaagctattaaccttgattgaagaagatattgatgaagtttatgcgattggggattcgtataatgatttatcaatgattcaatctgctgattatggttatacatttattcatgcacatgatgatattaaaagtcaaacgaagcgtcatgttcattatgtttatgaggttattgaagatatgttagggggaaataaagatgagttggcaagataaattaagaaaggttgaaccatatcaggcaggtgaacaacctaaaataaagaatctcattaaattaaatacaaatgagaatccatatgatccaggatgccttgtgaaagaagcaatcaatcaatttgattcttcacagttaccattatatccaaatcctgatgccgatgatttaaaacatagtatagctttatatcatggtttaaaagattcacaagtctttttaggaaatggttctgatgaagttttagcattaacatttttaacttgttttaatggcgaagcaccggttttgtttcctgatattagttattcattttatccagtatattgtgaattgtatcaaatgaattatcaaatggttcctcttaatgaaaactttgaaattgttaaagaagattattatcaagaaaactctggaattatttttcctaatccaaatgctccaacaggtttattagtgacattggattttattgaagatattttaaagcataatccagatagtattgttgtgattgatgaagcttatattgattttggaggagaaagtgcagtttcgttattagagaaatatgaaaatttattgattattcaaactttttcaaaattccgttctcttgcgggaatccgtttgggggttgcattaggaaatccaacattgatatcaaaattatatgatgtgaaaaattcttttaattcttatccaattgatagattggcacaagtgattggtaaagcgagtatggatgatagtgattatattaaggaaaatgctcaaaagattattaaaacaagagaatatacaaaagataaattaaaagctttaggttttgagatgcctgattcttacgctaattttatttttgttaagcatccagattatgatgctcaaacattatttactcaattaagagaaagaggaatattggttcgttattttgctaaaccaagaattaatcaatatttaagaattacaattggaacacaacaacaaatggaaacattaatactaacaattgaagatattttaaaagaaagataagttttgttatctttcttttgctaagcatattcgtttgagatgttaattttgtatgatataatgcgttgtaggaggactttatgaaaaaagatttggcagttatatttgatttagatggaacattattaaatactgatttattgattcacaaaacatttgatcatgtttttgaaaaatataaacctggatatatcttgagtgaagaagaacatttatcttttttaggaccaacattaaaagatacttttgctagatatttcccagaatcaatgagtgatgaattgatagaatattatcgtgattataatcatgcacatcatgaggattttgtaacgatttatccaactgtaaaggaaacgcttgagactttgaaaactaagggatatcctttagcagttgttacaacgaagtattctaaagcagcttatttaggtttggatttatttgatttaacccaatattttgatgttgttttaggaatggataatgtgaatcgggttaaacctgatccagagggtattttaaaggctatgaatcaaacaaattgtaaaaaagcactttatgttggtgataatacaagtgatatcttagctggtaaaaatgctggtgttcatactgctggtgtaaagtggacaccaaaaggaacaagtgagatggagaagttgaatcctgatttgatgattgatgaaatgaaggatattatacattttatagaaaggatggattaagatggtagatttaattgtcattggagctggacctgcgggattaactgcagctttatatgcaactcgtgcaggagcaagtgtgattgtattagatggaggagcaccaggtggtaagttgaatttaactgctgagattgaaaattatccaggagttgtgaaaaaaggacctgaattagcttattcaatgtatgaacaatgtttatcatttggtgctaaatatgaatttggtgaagtcacaaaaattgaagatttaggtaatcataagattgtttatacggctaaagaaaaatatgagacaaaatatgtctttattgcaactggaacaaaagagcgaaaaatgggtatttctggtgaagaagaaatgactggacatggagtttcttattgtgctgtttgtgatggaccattctttaaaaataaggttgtatgtgttgttggtggtggtaatagtgcgattgaggaatcactttatttaagtgatatagcaagtcatgtgcatattattgttcgtcgtgatgttttaagagctgatcaatatttaattgataaaatgaaggaaaaggataatattgaaatgcattatttaaagaaaccacatgcgattgaaaagaatgatggaaaagtaagtggtttagtgattgaagattctaagactggtgaattgtcaacaattccaacgaatggtatcttcccatttattggtttagatcctattagtggatttgttagtgatttaggaattgtggatgataaaggatatattgaagttgatgaaaatcaagaaacaaaggttaaaggaatctttgctggtggggatgtaacagctaagaatttacgtcaagttattacggcagcaaatgatggtgccattgctggacaatatattgcttcattgttaaaataagggaagattttttcttccttttttgtttaatggtgtcaatgaggaaagataattttattgagattgaaaaaagagtacacttatgatgtgttttttgatatagtataaatgacaaaaggggatgagtttatggataaaattgaagttgtagtcgtcactggaatgtctggagctggtaaaacacaggcaatggcaatctttgaaaatatggaatatcgttgcattgataattatccagttgcattgttaaaagagtttggtgatttgatgcgtacatctacaaaatatgccaaagttgctatggctgtttcattaggagacgctattttagcagtgcgtgtgctatctaatatggattggatagatttaactgtgattttcttagattgtgatgatgaagttttactttctagatataaacaaacacgtcgttctcatccattgatgattggtaatatggcatcttctttaatggaagctattcactttgaaagagaaatggctgatccagtaagtaagctagcaaatattattattgatactacattgttaaagccaactaagcttcaagataagttagaaatatattttcataaaggaaatcaagatacttttagagtttcttttgtttcttttggttataaacatggggtaccaagagatgctgatttattattagatgtgcgtttcttacctaatcctttctatattgaggagttaagaaatttaacaggaaatgataaggccgtttatgattatgttatggaacaagcagaaactaaagagtttattgaaaagacaattacttattatgattatttattaaagaaatatgaagaagaaggaaaaatgcaaatgattattggaattggctgtactggtggacaacatcgttcagtgactttaacaaattattttgctgattattattctaagtattatcaagtttataaatggcatcgagatgctgatcattaaggagggaaaaaagtgatatctttttcaagagttgtaaaagaagaaattgtttttaatgattttgatttagattgtgaaaaagctattctttgtgcaatgattaaaattattggaactttatctttaaaccaatcaggattatcactgacattacgtactgaaaatgcaaaaattgcatcaaaattgcataaattattaaaagatttatatcaaccacatattgagtttcgtgtgtctaaaaaaatgaaacttaaaaaaaacaatgtctatatattaattgtatctaaagctagagaaatcttagatgatttacatttgatggagggtattggtattcaaagtgtaccagatgctcaattattagagacagattcacaaaaaagagcttatttagcaggggtttttcttgcttgtggaagtgtgaataatcccgatacttctaattatcatttagaaatgagtgttaatgaagaagattttgctttgtttatagaagaattaatgaatcgttatgaacttaatgcaaaggttattaaacgtcgtaataaatatgttatttatatgaaatcagcagaaagaattggtgattttttaagagctattggggcaagtcaatcagttatggattttgaaatgacaagaattgatcgttcaatggcaaatacagttaatcgttggaataactgtgatattgctaatgaggtgaaggcaatgagtgcttctacggcacaaattgaagatattgcctatgttattgataaggctggaatagaaatcttagatgataagacgagaattgtcgcgttacttcgtttagagaatccagagttaaccttgaatgaattagcagatgcttattatgagcagacggggcaaaccattagtaaatcaggattacatcatcgttttaaaaagattaaagaagaagctcaaaaattaaaacaaatggagaatgattaatatggaaaatattaatatactatttggaagaagaattaaagaattacgtttaagacaaaatatttcgcaagaagaattaggtttccgttgtcagctttctaaaaactatgtttcggatgtagaaagagggagacgtaatgtatctattaaggttgtagaaaaatttgcggcgggattaagagttcctgtctattatttgtttaaatggcatgatggtgatgaatcagttcatttatagtttatatttgtcgtatagactagaaatgtaaaaaaggagaatatatatgggatatggttttatatatttattttgtgttttaatattattaatgttagcattgagattctttttgccttttcttatttatttaattcccgtacttgttattgtgtggattttaagaattctatttggacgtagacatagaaggcaaacaacctcaactgatgatcgtacatattatgaatcaatgtatcaacaaccagaagaaccaacaaatcctgatatcattgatgtagattataaagttgtagatgaagaagaacaagataacactcattagagtgtttttgtataaaggaggagttttatgatttgtccaagatgtaaaagtgaattaaatgatgatatgagtttttgtcctcaatgtggtttaaaaatagaaagatgtccgcattgccatcagccaatacttccaaatgctaaattctgttcacattgtggagaacgtttatatgaagatgttcctcaaggagtaggtggtttttatcaaccattaggtgatgaagataatttaaaagaagaaactgttgactttgaagatattccagttagtcataaggtgaataagaaagttattggtattggagttgctattttaatagcgttaacaggtatttcttatctttatctctatcatggaccagctttgaatctagctagagataattcttctcatcaaattaaagtgaaacaacaaagtattggtggaacaacatcttatgcaacatttactggtaatattaatttatctggtttagtttatcaaagtgaagataagttttatatttgtgatgatcaaggtcatcttgtaagtatggataaagatttaaagaatcgtcaaacgattcttaatgaatctgttcaatatgtgaatgtgacaaaagatatgatttattatgcaaataaagataattatttgtgtcagtcatcattagatggaaaaaataaaaagatattaataaataaagcagtttattatgtgattgtcaaagatgataagatttattatcaattagatgaagatcatgaagctttatatgtatatgatataaaaacaaagaaagaaacaaagttgaatgaacgtcaatcttttagtttaaatattttagatgataagatttattttacaagtagtgatgggatttatagtattggattagatggtaagggtgaagaaaagttattaagtggtaagtattataatttgatttatcaagatggttatttatattgtggtaagactgatggaagtttaatgtcttatgatattaaaaataaagaaacacagacttatgataagaatgttcaaatgtttataaatatgagtgatcacaatttgttttattatacaaatgatatgaatgttatgaaatatgatttgaaaacaaagaagaaaacaaagatttatagtggatatattacaggtggacaaattattggtgataagttgattttaatgactggtggaagttatagtgataatgcttatcaagttattatggattttaatggagaaaatcagcaaagattgtttactgatggacaaggtgattttatttagagaaaagctggaaggcttttttcttttttctattttattgtgaggaaactgtgctataatagtgcatatattaaaaatgagggaaaagtatgcttataaaagaaattattgatgcgacaaatggaaaattattgagtgggaatttagatgatgatattttaggatttactcaagatacaagaaagattaaagaaggggatttatatattcctttaattggtgaaaagagtgatggacatgcttatattgaacaggcatttcaacaaggtgcaagttcaatcataacatcacaggttgtagattatcctgataagaatgttatcttggttgaagatacccttcaggcaatgagtgatatggcaagatatttaagacttcatcgcaatgttaaggttgtagggattactggtagtgttggtaaaacaagtaccaaagatatgatttattcagttgtttcaacaaaatataaaacattaaaaacattaggaaactataataatcatattggtttaccattaacaatgttaagatatcaagatgaagaagttatgattttagaaatgggaatgaatcatttaggtgaaattgatcatttaacacatattgcttgtccagatattgcagcaattacgaatgtaggaactgcacatattggagaattaggttcaagagaaaatattttaaaagcaaagatggaaattgtaaatgctttagcaaaacaaggaacattggttattaatgatgataatgatatgcttcatactgtttctttaagtgatcatcatttattaagagttggtcaaaatgatggttgtgatttacaagctagaaatgttgatttaagattggaagaatcttattttgatattgattatcaaggaaagacttatcaagttcatgttcctgtttcagggattcattttgtttataatgctttaattgcgattgcgattggattgacattggatattgatatggaaagatgtattgaaggtgtagagcattttgaattaacaaagaatcgtatggatgtacttgatttagcagatggaataaaggttattgatggaacttataatgcaaatttagattctatgaaatcaagtttagatgttttaggacaatatcaaacaagaaaaattgcggttttagcagatatgttagaacttggagaatatgaacaagcattacatgaagaagtaggacaatatgttgttgaaaaaggaattgatgagcttttatgtgttggtaaagcttgtcagtatatggtagataaagcacaggagttaggcttaaagcaagcttatcattttgaagataatcaagcattgattgaatatttagatgaacttttagaaaaagatgatattttacttgttaaaggatctaatggtatgcatcttaaagaagttgttgaacatttgaaggagagaaaagctatgaaaaaattattagttatttgtgggggacaatcaactgaacatattatttcaagaatgtcttgtacgtcagtgttaaataatattcatttggaaaaatatgaattaactttagctggaattgataaagatggaacatggtatttattagatcaaaatcaggaagatttagcaaaagatacatggttagataatgctttaccaattgaagatatctatggattattaaagaaacaagatgttgtattcccagttttacatggtcaatatggggaagatggaacaattcaaggtttattagaacttgctcaagttccttatgtcggatgtcgtacaatgggttcaagtgttgcaatggataaaatctatacaaagaagatattagaaactgtaggtattcctcaagttcaatctttatacgtgaaaaaaagatatgatggtaaattggttgtcgttgatcatgaatttaatgaatctactgatattattcaagctgttaaagataaaatgggattcccatgctttatgaaagctagtcgttctggttcaagtgtaggatgttatagagtggataaagaagaagatttctatgataaattaaatgaaacagcaaaatatgatagtcatattgtcattgaagaatgtgttgattgtattgaacttgaaactgcggtattaggaaatgatgatcctattgtttcacgtgttggacaaattatgccacatggagagttttatacttttgaatcaaaatatgaagatgaagaaagtaaaacatgtattccagcattagttgatgaaaagattcaagaagaaataagaggttatgctttaaaggtatttaaagctattgatggacatggattatctcgtgttgatttcttcttagataagaaaacaaacaaggtttatttgaatgaaattaatacaatgccaggatttacgcgtatttctatgtatccacaattaatggctgattatggtatagcctatagtgatttaattgataaattaatagatttagcttttgatagataggaaagggagacctttccttttttagccttatcgtaaaagaagaattatgttaaaataaaaatggtgatagatatgaagatagggattatagatgatgataaggaatttgctgaagttttaaataaagaattagaacaactcttttctcaagtacaaataaaaagatatcaagagatatcagatgaattatataaagaagaatttgatattctctttttagatgttttattatatgataaaaaaagttttaatgaaggtgaaaagattttgactgtttttccccatacaactttagtatatatttctagtgttgaacattttgtctttgaaagttataaacaaaaaacattttattttgttagaaaatcaaatttataccctgatttaaaagaattttataaaaaatataatcaaagtcaattgaatgataaacaaatattaacaatcaaaggagatatagatatcttacaatgtgagattatttatataaattcatctaaaaatacagctacaattcatacaacctataacaaatatatcattaaatcatctttaaaagaaatattaacacaattagatcaatctagtttttttagatttaattcttatacaattattaactttagacatgttattgatgttagagaaaaatatatatgcttaactcaacaaaacaatattaattttgttagaaatagtaaggataagtttatgaaggcatatatggaatataggagaaagaagatatggaatggataattattaatgttattgaatctattcttttatcatggtttatatcttctttagtagatataaagtgtaaaaagtggttgtatagatttttattagcagctgtcaatttatctattattactttatctaattatatgaatatgtatgatttgtttttatcaactgctgtcattattacttcaactatcatttcgcatttctttacatataatacatggtctgaactgcttttaataacaacttttgaaggtgcgttttctactataactacttgttttacaattttcatttcgttgcaatggagtcaagttaatctttctcttatcaatcgtatattatatggattaggaacttatataataataaagaataaaaatcttgagaaaagatatctaaataaaaaagttacttatgagttaatactaattttgtattttattcattatgttttacaacagtttttacaacttttcatagttatcaaaagtgatttacctgaaatacttattacgattgtaatgatggtactttgtatttttgtattaattctcttgtttatggaaatatcaaagatgaatttggcacaagaagaatacaaacgtttaaaacaagaaaagaaaaatgaagaagcattatcctatttatatgatcaattaaaaataacaaaacatgatttaaaacatgattttgatttgttaaattattatattgaaattaataactttgaaaagataaaagattttatcgtctctaaaaaagcaatgatagatcatatgccaacgcttattcaatcaaataataaattattaaatacaattattaataataaaattattcaagcatatgctaaaaatatacaagtagaatgtcatattattgttaatgaatttataaatatggttgattatgatttgaatgaattattatcaaatatattagataatgctatagaaaattgtttaactcaaggtagaataattattgatattgttcaagaggatttgtttttgcatataagagtaaaaaatgataatgattctaaaaacttttcaaaagaattgattactaaaaaagataaagagaatcatgggtttggattaaagagtatcaaaagaattattgatcaatatcaaggaacatattctattgaaaataatgaagaatactatgaaataaagataacgctattattaaaatagtgtttttttgtatacaatttgcaaaatgtcctcgatatctgcaaaacgtccccaactactatcattaaaaataatactatattacaatgtaattagcttattataaaggaaaaatattatttatattttcgttatttgctttctgagttatcagagcactaagataaatgataagtttgctatcttttagtttatctcattattattgagtgatgtactctgatgaatgtataaatgaaatatatagatatcagatatcatagattagaattaataatttaaaaaataaataagatgaattgtttttatattcatctctatttttatttgatacactttaattaaagggaggagtgttggctaatgcttgaactcaaaaatattcatgtggggtatgggaaacatattatttatgaagatgcctatttttgtgctcatcataatgaattgacacttgttatgggtaaaagtggtagtggtaaatcaacattacaccagttagtaactttgcataatatagggaaatatgattattattatgataatgaaaatattggtcaattatcatataaacagaaacaggaatttattaataaaaagatggggattgtgaatcaaattcctgcttttattgatgatttaacaataaaagatcatatagcgttatgtcagtcattatgggatggatatgatattgatgaatacattcagcgtttagaaattcaacatgttttaaacgaatacccacaacagctatctggtggcgaaaagattagaattagtattttactggcaatgattcatcaaccagaaattcttgtatttgatgaaccaacagcttctttagataaacatcatagtcaattgattatagagttacttaaagaatatgcacatcaaggacatattgtcattgtttttactcatgataaattaatgaagtgtgagggagatgttgtttatttcattgaagataagattttaaattgtgtatatcaagatcatcaagtgaaaaagatatcttcttcaaagttaacaaagaaaacaactcaacattatttacaatatatttataagatgtttaatcataaaaagatattaaaagtatgtatgatcgtttttatggctattgcaataggtttaagttgtttttcagtattctatggaaattctgttatttataaatatcaaaatgagctaaagactgtaaataaagcaggagttatttctaaaaatacagatttttttgatgatactttatataacaattcctcaccaattgctaaggaggaattaaagaatcttgaaaatattaaacatattaataaaatatggccttatattatgtgtcatgatggatgtaatattatctcagataatataatcaatcaatttcgagtttttcaaaatcaaaaattaattgcagtacgagaaaaaggtgaaatacagtataatttagggacatataatgaagaatatgattattctcaaaaaagattaacttctacatttgatgttgatgaaggaatttatattgatcaatattttctttattatttgataactggtgaaataatggagagtattgtagatttagatcaaatgaaatttcaagaagttatgtctagtataaatacagatactgaaattgagtttcctataggaataccttattatgtagaatcacaggaatatcgagaactttattttaaacaaacgactataagaatgaaaattaaagggatgtattctggaccacttgattttaaattttgtaaagaatttagcgttaatcctgatatcttctatccactaagtgttgaaaaagaatatcgtgaaaagataagtcagggattattaccagctataaaagaaagtcatggtgagattataaaagaacctgtgataccattctatccaatttattatcaattttcagtagatgataatgctactttttcagaagttaaagaagaaattgaagctttgggatatcgtgtctattcagaatattatgataaagaagtccaagtattagttgctaaagatatgaacaaaggtgttacaatgatatcagcattgattatgtgtgttgcattaatgttgttttttggtatcaaatataatcagaaaaaagaatatcaagattttatcagattttttacaaatcgtggcataacaagtcaaaaagctaaaaaaatattaggatattattttatatatgaggcaattttatgttcagtggcttcacttcttactatgggaatcattatatatatctttatgaggtttatttatcaagagtttatttttattcatctctcattttttctattttgtataatattatcttttattattgaagtagggattccattattgatagttaggggtgaaaaagaatgattaagttagaaaatatttctatgaaatttactagaaactctattagaatcaataatttaaatatacctgaaaataaaataacattaataagaggactaagtggaagtggaaaatcaacattactttataaacttgctttaatatctaaagaaacacaatataagtatttttatcatgaacaagatcttatgacgctatcttcacataaaaaagcatatcttagaagatattgtattggttatgtatttcaagacttttgtcttttggaaaatatgacgatttatgaatgttttcaatattattgtcatttgattaataaaaaagaggataagaatgaattatcagaattattaaaaaaagttcatcttcataattctttagatcaaaaaattgaaacattgtctggaggagaaaaacaaagactcgcaatagcatgtgtcttactgaaaaatcctgaaattattattcttgatgaaccaacgagtgcattagatgaaattaatgaaagagaaatttttgaattattacaagaaatattaaaacaacaacaatgtacaatcattttggcaagtcatagctatatagctaatgaatatgctgatactatttatgaattaaatggtgagggtatatgcgttgtgaaacaagctaaagatgaagtttatcctgaaaaacaattatcctctaaaaaagattattcatttttatggttttatataaaacataattttaaaagtgaaaaactgatgaattgtttaatgattatgatattgtctataggatgtttaggtgttgctgcaattgagcatacaatatggcaatctttaaatgatattgatgcaagaattgataaattagctgattatcagctgatgattgagtttactgataatgataaaacttcaggaataaataatcaggattcaattattaaagatataacaaatcaagaaggtattaaagaaatatacccttattatgatctaagtgtcattgttgatgaagaagaaataccagtttatccactatatgcgcaaaatcgtcttgaaggtaagttatataaaacattgcaagaggaaagacatttatatccttcttaccatgttgtctataaaaatatagatcaaatcaataaagatactgtttattctcacttcatcgtgaatggtaaaattcaggttaaacaagatattccaataagtggagttatgtctataggaaaaattaatgcttataacaaatcattggattatatgttgatgaattatgaagatattcttcaacttgtaaagaaagcaaatggaaaacctaaggaaagtacttatattttattctgtgataatattaatactttaaatagtttgatgatatatattgctaataaatatccggatatcaatattttatcaacattccaagatgtaaatctattgattaatatgaaatatgaaacaataagtatgcttcaaatggaaaaagtcatcactgttctattaatggttatgatgtttatttatcttgattattggatgatgaaaaggcgtgaaaaggaattaacgattttaatggcaaatggagtcatgagacttgaaatgggaattattttaggtatagatcaattgataaaaatgttaacatcgtttttaatagcgttattggttattgttattttacagtttagaggtttatctattccaatatttaatttgttttctcagactggtattgttttaggagtaagttttatttgttcaatagttttatctgttataatgattagaaaattaaatccggagaagatatttagaaattaataaaatgacatcgtatatagaacagacaaagcatttttaaaaaatctattaagcgcgagaatagcatacagaaaggaagaatgaatatgaaaaaaatagtaatgttgcaaacggttatgagtatggttagtttaatcttatgtatgtacacaatgtatggatatggaataggattagatgagcagtatactttacaacagtttgctgataaaggaaatatctatattgtgtggatattgatggctttgagttttttgagttgttgtttaggggtaatgatgatattgaaaaagcgagattaattctcgtttttttaatattttattaaacttaaaataggattttgattatctctttataactttttatatgtccgtaaagccttattctatcggctttacgggcattttcattatcggtagatacttcacatctcttttcataaactctcatgttttgcctttggaaagtggtaaataagtggtaaatttcttacgctatcagacttaccatttcagcctttacaccgtccagtgacgcgtgggtgtacagattcagcgtgatattgatgttggaatgacccatgatatactgcaagctcttagggttcatgttcttgtttgctaaacgggtgcagaacgtgtggcgcaggatatgtggcgtgatgttcggtaatgagtcctcatggctcttgttgtacttcctaacaagatttccgaatgtagaggtatagtaagcccctgtcatgggatagcccttttgattgaggaatacaaaatcactgtaaccgtcaatcactatcggctgtacgttctttctttctgccaccaccttttgaagtgtctggcaggtttcctcactcattggaatcagacgaatgccactctttgtctttggcgtttcaatgtaatagccgacttccttattccgtagtagctggtggtctacattgataagcctgttctcaaagtccaagtcgctgaccgtcaatccgcacagttccgaagcatgaaccagcaggaattagcagacgcaatcggaatcaatatgcagagcctttccaagattgaaagaggtgtcaattttcccacctttgatacattggaaaagattacttctgttttaggtgtgacacccaatgagttattatgtggggaatggaagaacacttcccatatggaacaggaaattttgaagtttctggaatgtgaggaacgattgaatgtggagcttgcacacggacagtatgacaactattttgacagtgaggaagaatggaaagaatacgagttaaagaatctccgtgaatatatcatggactatattggttcagaggacaggcgagtgtctgacctgtacccaattaagcaactgatacagcgttataaatttcaaaatttgcttgataagtatgatgatttgtatagccttgacctgttttgggaaaccatcgaggggcatagaaatatcaacccttatgagtggaatcccgttgagggcaacatcatacttaacaggcatgtggacgaagatagagaatgtttgtccagtgtcctaaccatagaaggctttgaagatttgaaaggcataaaatagctcttatcctctcacggaagatacagcaaagtaaaaagcccagtcaagaatgcttcgcaccacctttggtggcaagttcttgacagggctttttatttcccgtgttgggttatcaagaggataaagagaaaacatgttcatgtttgaacgtgttctcattgatttattgctgaaatgataagatttactatatctttgaagccttgcatatacgctttttcgccatatacagagtttcttgcgttacaggcggataaggctctggccacggttttacactgtttatgcgttaaacctatcgaaattgaaaacacttcacaaacttgcgatagggttggatatgactgtttctgaattactggaattccctaaatgaactacagtgtcaacgtttttatgtaggatacatgtacaggcaaccaaaagttgcataagtagttgattgtatatttatcattgcttgtttataattaggattggaggtggaatatatgaacttaaatgaaaaaatcaaggaattaagaaaagaacgaaatatgtcacaagaggaattagcagagttaatagatgttactcgacaggcagtaacaaaatgggaaagtggtgcatcttcacctgatacgaaacatttaatacaaatagcaacaatttttaatgtaccaatagaaaagataacgggcaataagcaaacagggatttatacagtaaaaggaaatgaaatatgtagttattgtggaaagaaagcagaattctataaggatgaaagtttaactgaagcatactgttctcctaaatgtcagcagttacatacaatagcaatgaataaaattaagaaaaatatgaaatggtttagtattggtataattatttctgtcttatcattactttctggtgcatttttaaatttttcagtagataaaaatcttgtagtaggtggtggaattatattattaggtattaccctcattttatttcctttttgtacaccagagtcttataaaaaatatgggtatataaagaccactcgaattggtcgaatattaggattcataacggagatgtttggtctgataattttgtttttaggatagcaatttaaaacacaaaaaaggaggaggtgatgtatgtgggaaaatattaatagctgaattcacagaaaatgaagaaaccattttcggtgaaattgttgaatggttatcctgtaaacttggcaatgacccaagaattataaaacaatcaaatataaaatttcacttagacccttatactagaactttttcgtcggaagctgggaagagcatatatctgactgcaaaagaatttgatttattgttcatgtataaagggcaagtatttacgaaagagtaactttatgaaaatatctggggctatgattatatatcagatgctaaaaatctgacttcatttatacggaagctaagaaaaaagattgagccgttcccagacaaaccgcaatacctattaaccgtatggggcatcggctataaattcaacgaagaaaaagcgtaggttacatatcactatttagtgaattacatataacctatgcttttatccatagtgccatatcaaagctctttagtaagtggtaaattatacttctaaaacctacgttattacttataaacctagagtttaagcgataatcaacatttctattttaaatttaataaaatcttaataactcttattaaaagaaatggtaggataaaagagagcgaggatgatagtatgaagaaattattaactgtaataatagtgtttgttttatttattgtgacaagtttaactgtggatatattgagacagcaattctatccttatgagtatcaagatgtaatggaaagcttttttggaaaatatcatataaaaaaggaacatacacaatctgagcaaaatgctaagggagataaatatagttattggagaatatcttgttcagacaagaaagatgattattttattaataatgaatatggatttttttctcaacttcatagtatttatatgtatgaacatgaaaatgaactaaaacagaaaatagattgccaaaatattgatgtttctttacgaaatgcttatgattcttactcacctaatacgactgtagataaagaaattcctaatgatgatcaaatgattcatgaaaaatataataaaatgtatccaaagcagtttcaagtttataaacatcaagatataacaaaactatttgaagaaaaaccaatacctttatattttattattatttgtgaaagtcaggagattgctcaacgttttattaaagaaattaagaatgttaatgcaattattaaaattgtttcacatgaacgctctgaagaaggagtatatattgatcatgagacgatgaaaggaaatgaggattcttatttatttgtttatcaaggtaaatatattgataatggtgtagagattatggggcaagtgacacaaaaagatcaaggttatcgtactatttctaatgatacaattgtatataattataatgagtttattaagaattgtttaaaattttgataaatgcgaaaattagtatatgaaattttctaaaactaaaaattcacaaacaaaattatgaaaataatgttgactaaaaattggaaaaggtatatcatatatgcaacaaccctataagaaatacaaagataggaaatagtaggtagtgtagaaagcatagagaggctctggatggtgtaaagagtcatgacttcattattgaactcgtccttgagtggagcactgaaacatgtggagtaagctgctacggaacttgcgaccgttatcacgctagagtatgaacttattgataagcgtacttgataaggttattactgtgaggtaataatgaatatgaggtggaaccacgaagtgattaactctcgtcctctattatgattttttcataatgaggagcgaggttttttattatatagggataggaggtagaagcatgaattataaaaagtataagaaatttgaaacgattaaattgaaagatcgtacttggcctgacaaagaaattgaaaaggcaccgatttggtgttcagtggatttacgtgatggaaatcaagctttgattacaccaatgaagattgaagaaaaagtggaaatgtttcaattattagttgatttggggtttaaagaaattgaagttggttttccttcttcttcacaaattgaatatgattttttaagattgttgattgatgaacatttgatacctgatgatgtcactgttcaagttttaactcaagctagagaacatcttattagaaaaacatttgaatcattaaaaggattagataaagctattgtgcatatttataattcaacttcaatcctacaaagagatgttgtttttaataagagtaaagaagaaattaaaaagattgcagttgaaggaacaaagcttgttaaagaattatctcaagaatttgagggaaaagttattcttgaatattcacctgaaagttttactggtacagaagttgattatgcacttgatgtatgtgaagctgtacttgatacatggggagcatcttctgataataaagtgattattaatttaccttcaacagttgaaatggatacaccaaatgtctatgctgatcaaattgaatggatgtgtagaaattttaaagatagagaacgagtcattgtgagtgttcatccacataatgatagaggttgtggagtagcaacgacagaattagcattgttagctggtgctgatagagtggaaggaactttatttggtaatggtgaaagaacaggtaatgtggatattattacattggcacttaatatgtttactcatggtattgatccaaaacttgaattaagtcaaatgaatcagattaaagctatttatgaaaaatgtacaaagatggaagttccaccacgtcatccatatgctggtcaacttgtctttacagcattctctggtagtcatcaagatgctattaataaaggaatgcatgcttatcagcaaagaggacaagatgtttgggaagttccttatttaccaattgatccagctgatttgaatcgtcaatatgaaccaattgttcgtattaattctcaatcaggtaaaggtggagttgcctttgtgatggatactgtttttggttatcatttaccaaaagcattgcaagctgattttgctaaagcaattcaagatattagtgaaactgaaggtgaagtatcacctgaaagaatttatgatacatttaaaaaggaatatattgatattgaggaaccatataaatttattaaacaaagacttattgatttaagtgatgatgatagtgaatatgaaagaagggcagaagtgacaattgaagatcatggtgaagtcaagactttaattggttatggaaatggacctatcgatgctgtaaagaatgctttgaactcatcagatgatttcttatatacacatttattagattatagtgaacatgctttaacatctggttcatcagctaaggctgcagcttatgtacaacttcgtcctaaaggaagtgcggtttgtgaatatggtgtaggagttcatgctaatattacaacagcaacaattaaagccatgatttcagcaatgaatcgaatttatagaaatatcaagaaagaaggttaatatatggaagaacttgttttatctattcttgttcataacagttctggagttttaactcgtgtcagtggcttgtttgcaagacgtggctacaacattgatagtttaacagtaggaacaacgaacactgagggagtttcaagaatgacagtggttgctcatggtgatcaacaaattcttgaacaaattgaaaagcaattaagaaagttagaagatgtgattgaaatctttgctttacctcgttcatcatcagtttatcgtgaacttgtgatggttaaggttgaagctgatcaaacaacaagagctgatattgtttcaattgttgatatttttagagcaaagattgtggatgtatcaccacattcaatggttattgaagtgactggtgatcatggaaaagttgatggcttattagccatgttagatggtttcaatatcgttgagatcgtacgtactggtttatctggtattgcaagaggtcttagtgattttgatataaaaaaagaagataactaaatagggggtcaagaaaatggcaaaaatttattatgaatctgattgtgatttatctttattagatggaaagacagttgcaatcattgggtatggttctcaaggacatgctcatgcattaaacttaaaagaatctggggttaatgttattattggattatatgaaggttctaaatcttgggcaaaggcagaagctcaaggatttgaagtttatacttcagcagaagctgctaaaaaagcagatatcatcatgatcttaatcaatgatgaattacaagcaaaattatacaaagaatcaattgaaccaaacttagaagaaggaaacatgttaatgtttgcccatggtttcaatattcactttggacaaatcgttccacctaagaatgtagatgtcactatggttgctccaaaagggccaggacatacagtacgtagtgaatatcaagctggaaaaggtgttccttgcttagtagcagttgaacaagatgctactggtagagctcaagatattgctttagcttattcattaggaattggtggagcaagagctggtgtgttggaaacaacatttagaactgaaactgaaacagacttatttggtgaacaagctgttttatgtggtggggtttgtgctttaatgcaagctggttttgaaacattagttgaagctggatatgatgaaagaaatgcatattttgaatgtatccatgaaatgaaattaattgttgatttaatctatcaatcaggatttgaaggtatgagatattctatctctaatacagctgaatatggtgattatattactggaccaaagattattactgaagatacaaagaaagctatgaagaaaatcttatctgatattcaagatggaacatttgctaaggacttcttattagatatgtctgaagctggtggacaagctcactttagagcaatgcgtaaaaaagctgttgaacatgaatctgaaaaagttggtaaagaaatcagaaaattatacagctggtctgatgaagataaattaattaataactaatacacacacactttgtgtgtgttcagtaaagagtctattgactctttagtgatgacatacaaaggggtaaagggggaattcatatgtcaatgacaatgacacaaaaaatcttggctgatcatgcaggaatgcaagaagttgttgctggtcagttaattgaagcaaaattggatgtggttatggccaatgatattactggaccaatggcattaccaatttttaaacaaatggctgataaggtgtttgataaggataaagttgtattggtgcctgatcattttacaccaaataaagatattaaatcagcagaaaattctaaagctattcgtgaattttcattaaatcaatgtttaactcatcatatggaacaaggaaaatgtggtgttgaacatgcgattttaccagaaaagggtattgttgtagctggtgaatgtattattggagctgattctcatacttgtacttatggtgcattgggagctttttctactggggtaggaacaactgatattgccacaggtatggcaactggtgaattatggtttaaagttccaagtgctatcaaatttgttttaaaaggaaaattacaaccttatgtaagtggtaaagatgtgattttacacattattggccaaattggggttgatggggctttatataaatctatggaatttgttggtgaaggggtcgctgagttatctatggatgatcgttttactatttgtaatatggcgatagaagctggagctaaaaatgggatttttccagttgatgataaaacaagagaatatatgcaaaagcattcaaagaaagtttataaagaatatgtggcagatgaagatgctatatatgatgaagtgattgaaattgatttatcaaagattatgccaacagttgcattcccacatttaccaggaaatgcacatacaatggatgaaatcaataatgaggaaaagatttatattgatcaagttgtgattggttcatgtacgaatggacgtatgagtgatttacgtaaagcagctgccattttaaaaggtaaaaaagtggctgatagagtacgtgtcatggttgttccagcaactcaaaagatctttgttgaatgtattcgtgaaggtttggcggaaatctttgttgaagcaggatgtgcttttaatacaccaagttgtggaccttgtatgggtggtcatatgggagtcatggctaaaggtgaaaaatgtgtttctacaacaaatcgtaactttgttggaagaatgggtgatacagaagctttgatttacttagcttcacctgaagttgctgccgcaagtgcaattgctggatatattgctgatccaagaaaggtgggagaataagatgaaagccaatggtaaagttttaaaatatggagataacgttgatacagatgttattattccagcccgttatttaaattcatttgatgccaaagaacttgcaagtcatgcgatggtggatattgatcccactttcgtagaacgagtggaagttggagatattatggtggcaggaaagaactttggttgtggttcatctcgtgaacatgctcctttagctttaaagacagcaggtgtgagttgtgttattgccaaatcatttgcgagaattttctatcgtaattctattaatattggatttgcaattttggaatgtgaagaagctgctgatgatattgatgaaggaaatattgtagaagttgattttgatacaggaaaaatttataatcaaacaaagcataaagaatatcaggcacaacctttccctgaattcttacaaaaaatgattcaagtcaatggtttagtgaattatgtaaatgagaaaaagagaggttaaattatggaaaagaatattgcagttattaaaggcgatggaatcggaccagaaattgtcaatcaagcgattaaggttttagatgcgattgcatgtcaatataaacatacatttcattatcaaaatattttaatgggtggggcttcaattgatgaatatggagttccattaactgatgaagctatcaaaattgctaaagcaagtgatgctgtattactaggttccattggtggtgataccaatacatcaccttggtatcagttagaaccatctttaagaccagaagcaggtttattaaagatgcgtaaagaattaggtttgtttgctaatttaagaccggcttatttatatgatgaattaaaaagtgcttgtcctttaaaagaagaaatcactgaaggtggttttgatatgatgattatgcgtgagctaactggtggattatattttggggaaagagaaaccaaagagattgatggagaaatggtggctcatgataatttggtttatagtgaaaaagaaattagaagaattgccaaacgtggttttgatatagccatgaaaagaagaaagaaagttacaagtgtggataaagctaatgttttagatacatctcgtttatggcgtaagattgttaatgaggtggcaaaagattatccagaagttgaagtagaccatatgttagtagacaattgtgcaatgcagttggtaaaagatccacgtcaatttgatgtaatcttaactgaaaatatgtttggtgatattttatcagatgaagcaagtatggtaacaggatcaattggtatgttatcaagtgcatcactaagagaagataaacttggaatgtatgaaccaagtcatggaagtgcaccggatattgcaggaaaagatattgcaaatccaattgcaacaattctttcagcagctatgatgttacgttattcatttgatatggatgatgaagcaaaggctattgaagatgccattgagaaggttttaaaagctggatatcgtactgttgatattatgtcagaaggaaaacaacaagttacttgttcgaagatgggcgacttgattgtggaaaatttataatggggaggtcacatatgagaagtgataatgtcaaaaaaggggctgaaagagcaccacatagatcgttgtttaatgctttaggaatgacagaagaagaattatcaagaccattaattggggttgttaattcttataatgaaattgttcctggacatatgaatttagataagattgctgaagcagttaaaaaaggaatttatttagctggaggaacacctattgaagttcctgctattgctgtttgtgatggaattgcaatgaatcatacaggaatgaaatattctttagtgacaagagaattaatttgtgatagtacagaatgtttagcgaatgctcatcaatttgatggtttagttatgattcctaactgtgataagaacgttcctggtttattaatggcagctgctagattaaatattccaaccatctttgtgagtggtggaccaatgttagctggtcgtcgtgtggatggaaaacaaacatgtttatcttcattgtttgaagctgttggtcaattgaacgctgggaagatcactgaagaaaaattaaaagaaattgaagaaaaagcttgtccaacatgtggatcatgttctggtatgtatacagctaattcaatgaactgcttaactgaagttttaggaatgggattaaaaggaaatggaaccattccagctgtctatagtgaaagaattagattagctaaacatgctggtatgcaaattatgaaattagttgaacaagatatcaaaccaagagatatcatgacaacagaagcattcttaaatgctatgacagtagatatggcacttggatgttcaacaaactctatgttacatttacctgctattgcatatgaagcaggtgttgaattaaatttagaaattgccaatgaaattagtcaaaaaacaccaaacttatgtcacttagctcctgctggagatacatttattgaagatttaaatgaagctggtggggtttatgcagtgatgaatgagttagataaattaggtgttttacacactgatgtcttaacttgtacaacaaaaacattaaaagaaaatattgaaggatgtgtgaacttagatccaaacatcattcgaccaattgataacccatatagtcaaacaggtggtattgctgtattaaaaggaaatttagcacctgatagctgtgttgtaaaacaaagtgcagttgcacctgaaatgttacaacataaaggaccagctagagtctttgatagcgaagaagaagcaataactgctattcgtgctggtaagattgtcgctggagatgttgtggtgattcgttatgaaggacctaaaggtggaccaggaatgcgagaaatgttatcaccaacatcagaaattgcaggtatgggattagataaagatgttgctttaattactgatggtcgtttctctggagcaacacgtggagcttctattggacatgtatcaccagaagcagcagttggtggacctattgctttcgttgaagaaggcgatatgattgatattgatattactaatcatcgtattgaattattagtcagtgatgaagaattagcaaaaagaaagaaaaactggcaacctaaagtacctgaagttaaaggatatttgaaaaaatatgcagcaatggttacttcagcaaacacaggagccgtattaaaagtcaaataaagagaaggaggaaacactatggaaatgaaaggatcagatattgttgttgaatgtttacttgaacaaggtgttgacactgtgttcggttatccaggcggaacaatactagaaatctatgatagtttatataaatatcaagataagattaaccatgtcttaacttctcatgaacaaggggctgctcatgcggctgatggatatgcacgtgcgactggaaaagttggtgtttgtatggcaaccagtggaccaggagcaactaatcttgttaccggtattgcaactgctcaaatggattctattccacttgttgcaattactgccaaccaagttgtaccactacttggaaaagacagtttccaagaagttgacatcactggagtaacaatgccaattacaaaacataattttattgttaagagagttgaagatttagcaccaacaattcgtaaagcattccagattgctaaagaaggtagaccaggagctgttttggttgatattactaaagatgtgactttagcacattgtgaatataaacatttagaacctgaacatattgaaagacgtaattatacttacccaacttcaacaattaaaaaagcaattgaaatgattgaagaaagtgaaaaaccatttgtatttgttggtggtggtgctgttgcagctaatgcatcagctgaattaaaagaatttgtggaaaaagttgatgctccagttactgattctttaatgggaaaaggagcttttgatggaacaaatccacgttatactggaatgttaggaatgcatggaacaaaagcaagtaacttaggtgtttcacaatgtgacttgttagttgttgttggagcaagatttagtgatcgtgtgacgggaaatgctaagaagtttgcaaaacatgcgaaaatcattcatattgatgttgatgaagcagagattaataagaatgttatggttgatttaggtattgttggtgatgccaaaagtgtattaagtgcattaaatttattattgaaacaacaaaatcatccacaatggcttaaagaaattcgtgctttaaaagatcagtatccattaagctataatcctgatgttttaacaggaccatatgttattgaacaaattgaagcattaactgatagtaatgcaattatttgtacagaagtaggacaaaaccaaatgtgggcagcacaatattatcattttaggagaccacgtcaattgattacaagtggtggacttggaacaatgggatatggtttaggtgcttctattggttgtaaatatggaaaatcagaacaatatgttttcaatattgctggagatggatgttttagaatgaacatgaatgaattagcaacagcttctcgttataatgtaccaattattgaagttatcttaaataaccatgtcttaggaatggttagacaatggcaaactttattctatggtaaacgttattctgcaactgttttaaatgataaagttgatttctgtaaggtagctgaaggtttaggatgtaaagctattaaagttactaagaaagaagaagttgcaccagctattcaagaagcaatggattataatggaccagttgtgattgaatgtatgattcaagaagatgataaagtcttcccaatggttgctccaggagctgctattgatgaagtctttgatcaaaatgatgttaatgaataatcaaaaaccttatagagaaaattctctataaggtttcttctttttcttgtaaaagttgtgcatattgaatacaaattaaatcagcaataacagcaagaggataaggatgacttgcatagtccttacggctatgatagcgaatatattcatctacatacggaagggatatattaaaattagatgtaatcatataaatcttaggtttaacttttaagttcttaaaaggtttactacgctgaaatacacgatcaaaataagtacctgattcagaaaaaataatgattaatgtatcttcatcagcattttgaatatattccacttgattaataaacttaatacaagtaaataaaattttgccactcgtttgtaaatcaaactgcaagtttaaagcaatattttcagattgcatataaccaaaagcagccacttttttatattgataaatatctttaacaagattttgaatatcttcttcaatcacactattataaagtgattttaaattatccatcacgcttaaaatataagatttacataaagagctagcttcaaaagatttaaaatcatatttctttttagcatgttcatgttcaattgcaaatctagcgacttgacttttaagtgcgttgaaatcatttaaaccaatatcacgacaaaaacgtgaaatactggaattagaaacataacattgtttggctaaatctgttaatgtaatatcttctaaatcatgaatattttcaatcaaaaattttgcgattttataattgtttgaatcaataggctcactattaatagtagatagcaagataatcataagattaaacatattttttcctcttttcgacatatgattatattatatatatcacgaaaggaggggaaatacaatttatttttttatgataattgtttgggctattttatcatgaaaagattgggaatttggttgaaaataagcatataaaatagacagtaaagttaatccataagcaagatactttagtggctcaacaaaacttgtaaaacctaacacaggtaatagttttcttaagtaagttgcagttatgacaatacccccttctaatagtgttgctccaacaagttcccttaataacattgtctttaaagtaatattgttttcattgatatcaacaatttgaatcttacatatttttttacccaatgtttgtcctttccaaaggaatacaggaatgattatgtaatatatcaaaccaattgctataccatataaaataagtaaaagtgctgtttgaaaatcataatgggtaaaatcaaacatataaggctgtaaataatcaccattacgaaaatagaaagtgataggaataacagctaacatgtttgttaagtaccaatcaataaccattgctaaaaatctctttactcttaattcaataatatcatttttatttgtaacttttttctttgacatttttctcacctcaaaataaactttttaaaattataacaaagtcatttattattcatcaattcatttccaaatcttggaaataaaaagaagatgaattttcatcttctttagaaatcaattataatcttttgtaatcttctaaatttaataatgatgcagcatcttgatcacaaatcactgtaaaattaggatgtaattttaagattgttgcaggtaattcatctgtaatcggtgaatctaaaacttgttttaagatttcagctttttcttttcctgtcacaatcattactaaatgtttaacacgcattaaactttttggccccattgtaagagtgattggtaaatgtggtttttcaggatatccaggattagctgcattttttgttttacgatccattggataagtataactatccattggtgtacatcttggacaattactgcagaaatgaccatcaaatcctaaaccaatcaacatcacatcaataccaccagcgttacggatttcttgatcataagtttcccaattttccattgttgttgtgtgaatgcgttcatcaggaatatgagcatctttaaagaaaagttcttgcatttcttcccagttaggaccatatggtttatcaagatatggtgcttcatcaaataaccaatactcaatatccttaaatttatcttggtctttgatataagggatcatcatcttataaagattgacaggtgatttcccagctgttaaagaaatattcacacgtttgtcttgcatcatagcaccgagtaaaatgtgcattgcactttcactcattttttgttctgattcttcaataattaatttcataattctttcctccttgatttatatcaagaagataaaacttacacaagtcacattataagtgattttttgatagtgtcaagaaaataatttttattttaaatttatgaaattcctaattatacagtgctaaattaataatatatcttaattacattgaaaaatcaacacatttccacaatgtggaaataatttcgacaatatggaaaagaattgccaaaatagtgttgaaaaagatataattcaggtacatttgagaagggaggaatatctatgaaattcatggaaaaatttaatcaacttgctgatcgtactttactacctttagcaaataaattggggaatcaaagacatcttgcagctattcgtgatgggatggttgttgcgattccactatcaattctaggtggtgtttgtttaattatttcaacacctccatttaaaccagaaacattaccaaattggggagtcattagcgatatgttaatgggatggtataattgggcgcaagcaaataaagcaatgttacaattaccctataacatgacaatggcattaatgggattgtttgtggcttttgcgattgcttatcatttggctaagaaatatgagatgccaacattaaatgcagcaattgtctcaaccgcagtatttttaattgtttcatcaccagttgtgtctgctgtgccagctagcttaatgagtgaaggggcaaatatgacagatcttcttacaaaggcaggaaattatatcccagcaacattcttggatgccaaagggattttcacagctattattgtttccattggatgcgttgaaattatgcattttatgttgaagaaaaatattcgctttaaaatgcctgaaggggtaccaccagcaattgcttcatcatttgatgcgattattccattgtttgtatgtgtggttgttttctatgcactttcactatttgttcaaaatataagtggtgaattgttgccaagtatgattatgacattacttgcaccagctatttcaggattagattcattacttggaatttgtttaattacaattattgcacaaacattttggttctttggattacatggtgcaagtattacacaacctattcgtttgccatttatgcaaatgtatttagttgctaatattacagcattttctgcaggtgatccagttgttcatttctttacacaaccattttggtcttatgtcattactcttggtggaggaggagccactttaggtttatgtatcttattgttgcgctctaaatctgtagagttaaaaacacttggtaaattatcaattggaccagctatctttaatatcaatgaaccaattatctttggtttaccaatggttttaaatccattaatgatgattccatttatatttgtaccagtcgtgaattctattattgcttatgcatgtatggcattccatattattggaaaaggtgttatagaaacaccatggacaacacccgctccattaggtgcagctttaggatgtatggatatcaaagcaggaatacttgttattggattaattatattagatatgtgtctttattatccattctttaaacttatggaaaaacaaaaattagatgaagaaaatggagttcaaaacatttaatctataaaaaagaagataaacttacacaccataacttcatttctatcattcaattttgttttacctcaaatgtcttaggcatttgaggtttatttattttattgaaatataagaaagtaaataaaaaaagttagtatttcttcatattagatcaaatatgtttaacaaaaagctagttattttgttttttaaaacttgattgaagaaaaataatcaaaactgtataatgaaataaaagcataaagaaagtttggggaaatgatatgaaagataatagggaaagatttattcaggatatgcttgatacttttgatgatacaaatgcatatcaggtaagtttgtttttatcagtattttttggtttagtaggtttattttatgccataacaacctttccttctattttgccatatatttatatatatgatacttattttgcttttttaggattgtcggttttttgtatcataggaggaataggatgtttatatgtattgtatggacattatatttctacaaaacatcattcagttcatgaaaggattcactatttacccgtggcttttttatcaataatacctggttttatcatgatcatgtatagtgctttagtcactgcagcttcttttacttttccgatttccattattagtttctatttatgtttttatgcaattattgtttttatcattgcatattttatggtacaaaaaagaataaatagtgaaaaagaagtttatcaaaaaaagacgttaagatatgtacaatgggtaactattcttttacttgttatagcttttttatttatattatttttaagaggatcagtttttgaggatttagtaaagattgctttaattactattattgtttcgttttttgcttatcaggcagccagaactttactatcaagtcgattgatgaagaaaatggatatcgatatgattgattatcagaatttatatcatgatggtcgtttaggtgaagttgatctttcacaaaaagcgcgtgtatatatcataaatgatggaagaattgataaatctttaaatattttagtggaatttggatttgattgtgatgattgtatgaatgctattataaaacatcagccattttatacatttgatgaaaagatgtattatgatcttcaatttatgaataagcttttaatgcgtttggcttatgaagatgttccttttcaggtagaagtcttaaaaaataaagactgggaaattgatgaaagttatcaattaatagaaaaacatcgttttgtccgtaagaaaaaagcagatgccaaagaaaatgatgatgaagttaaagagaaaaatagttggttatttaatattgtgatgagtataattgttggaattggaatgatactatatggtctatggtcagcattttttccagttaattattttaaacctgtgcgttggtgttcatctgaacaaattcaaacttattacaatgagtttacttataggagtacgagaacactttatcatttgatttgtatttggattatttttttagtttggttatttgtgaaaccaattcaaatatgggtaagtggaataatgggagaatctattcaaacaatatggatagcttttggtattatctttgttggagaattgtttgtttttccaatgtatttaaaaaaattaaaagcaattctacaacaagaacataatgttcataattatgaaaaaagagcatttttgttatttatattgtattcttttataagaagtttaataaaaggatggcaaaaatctttatgtatgttgatatttttaattgtgagcattgaacttgcaaaatcaatttacatttttatacgttatattcaacatagaaaagaagtaaaaatagtgaaacaaaatgaagaatacgaaattattgaagaatatgatatgcaacctattattgatagattaaaagaatttaaagaagatgtgattgttttggaatatagtgatttaccggttaatcgttattgtagtaaattaggtggattaccttatttattagagggtgaaaatattccctgtgatggaaatgaaccgttaatattgttggcacaaattaattttgatgaacttaaaggaaaaacagttggggatttaccagatcatggaatgttgcaattctttatcaaatgtgatgatgtttacggatgtgaatttgattttaatgtagataatcctaaatatcgtgttgtttatcacgaaaaagttgattatatagcaccactttgtcaagatattgaatatgttaatgaagaatcaccattgcatggagaatatcgtttaaatttatctattcaacaagttgaaggactatcagtaagtgattttcaatttatcgatcgtttaaagaaattgtgtgatgatttattaccaaaggattttgaaaataatgatggatttatggatgctctttatgagtacgttgaatttaatgaaaataatcaaatgttaggacaggggtcttttgctcaagaggattctagaggaagtgagtcaatgcttattttacttcaattattgagtgatgaaacacatatgatgtggggagattatggaacatgtcattttcttattgataaggatgatttgaaaaataaaagatttgatcaggttatatatatttgggattgttattaagatttgattttgatcttctttagatattcttaagaaattctttaccatatattcatatgatatccatataatggtgttaagatatgataaaattctgattaaaatatcatgatatatggaaaaatatgataaataaagtgggtgtgaatatgcaaaaaataaagggattaacaaatcaagaggtcttagatcaaattgatttagggcatatgaatatatctccaaaaccattagttaagacaaataaacaaattatatttgaacatgtttttaatttgtttaatgcttataactttgttatagcatgtgcattggtatttgttcaagcatggtcaagtttattctttgttgtgattgtaagtgccaatacagttattagaatttatcaagagatacgttctcgtaatatggttgctaagttaaatttaattatttcacctaaaacaaaagtattacgtgatgaaacaatacaagagattgataatgaagaaattgtcttaaatgatgtggtttattttgaaactggaaatcaagtttcttctgattctattgtgttagatacagctgttgaagttgatgaatctttacttacaggagaagctgaccctgtattgaaaaatataggtgaccatttattgtcaggaagttttgttgtttcaggtgcatgttatgcaagagttgaacatgtgggaatagataattatgcgactcatcttgctaatgaggcaagacaaagaaaaccagtgacatctgagttggttaatgtttttaataaagtgacaaaatttaccagttatttagttgttccattgagtgttttgatgttatatcaagctttaggagtgagagaagaatcacttgcgacagcaattgtcaatacttcaacagctttacttggaatgttacctaaaggattagtattattgacaagtgtttctttagctgccagtgttgtgcgtttaggaaaaagaaaagtgcttgttcaagaaatgtttagtattgaaactttatcccgtgttgatgttttatgtcttgataagacaggaactttaacaaaagggaaaatgaaggttcaagaggttgttgatttagtcaatcctttatcacttgatatgcaaaaagtcatgagttcatttgttggacaaagtgttgataataatgcaacttatcaaacattaaagcaatactttcaagatgagatatgttatgaagtgaaaaatcgtgtcccattttcttcagctagaaaatggagtgcgcaggaactagaaggtattggaacgattattgtaggagcaccagagtttattgtacctcaatatcaattaccacaatatattcaagaagctcaaaatagtggagctcgtgttttaatggttgcccatcatgctgattttcaaacttttcaagaacatcttcatgaagcaacaccactagctttaattattattttagatcctctaagagatgatgcgaaagaaacactggctttctttcaagaaaatgatgtagatattaaagtgatttctggggataatccaataactgtaagttcactagcaaaacaagcgggagtcaaagatgctcatcgctatattgatgcatctactttgacaaccgatgaagaattagaaaatgcaatcatgaattacaatgtgattggtcgggctaccccaaaacaaaaacatcaaatgattttaactttacaaaaacataaacaaaaagtcgcaatgacaggtgatggagttaatgatgttttggcattaaaagatgccgatgtttcaatcgcgatgggatctggctcagatgctgctaaacaaatctctcagtttgttgtgattaatggtgaactatcaacaatggtagatgttgttaaagaaggtcgtttagatattaataatgtgacacgttcagcatctatgtattatcttaagacaatctatacaatattgattgctatttcaactgtattattaaatatgccttatccttttattccttttcaaatgactttattagataattttattgaaggttttccttcttttatgattttatttgaaaagaatatcgataaacaaaaagaatcgattggtagacatgcgatgcgttattcattacctaatgctttggttattgttttaagtgtcattgcattaaaacttcttgctcctatattatctttagaattacatgaagtctttacaattctttatttttcaacttcattaatttctattcatatgatttatcgtatttatagtccaattaattggtatcgtacatttgtattgattatagatattattggcttttgtatggccacatatatcttctgggattggttacagcttgctccacttacaatgcaattattccaatatatattgattataattgtcattggtatgatcttagcagcaatcatctcacattttgtgaatatttatttagatcgagaatgagacaaaacagctcattctttttatatgacttttgtcacttttatttatgatagaaatcatgttaaaataaaaaagagtgtaggtgatagatatgcataaacaaaatcagaaggctctttttgggattatagtgacaattgcaatgatgattgtaggtttgatttatacaagctatagtcgtccttcatctcatcataaggtttttggtgtcacttatatgacaatgaataatcctttttatgaaattattaataatgaattagaaaaagtgattgatcaaaacggggatcgacttattaccttggatccagctttagatgtgacaaaacaaaatgaacagattcatttctttatcgatcaaaatgttgatggaatatttgttaacccaatagattataaacaaatacaaccagctttactagcagctaaaaaagcacatataccaattattgttgttgatgcacctattaaaaataaagaactggtcaattgtacaattgtttcagataactataatgctggtgttcaatgtgccaatgatatgatgaatacaatgtcatcagctaaaattgttttattaaaacatagtagtgcaaaatcagctaaagaccgaattgatggtttcttagatacaatccaatctcatcctcaatatcaaattgttgacgaaggagaatgtgaggggcaattagaacttgccatgccgttaatgcaaaaaataataaaaaaacatcgcgatattgatgttgttatggcacttaatgatccgagtgctttaggggctttagcagctttagaaaataatgggatgaaaaatgttaaagtatatggtgttgatggaactcccgatgttaaatcattgattcgtcaaacaccaatggttgctggaacagttgcacaatctccaatatcttttggttatactgccgctttaaagatgtatgatttattggctcataaaacagttgattctaatattattgttcctgtgactttaataaccaaaaagaatattgatgattttgatgaaacggggtggcaataatgaatcggagttattggcaatctttgtcatctttaagagttttcatgattcttttgaattttattattattgttttttatggcagtgtttttttactcgcaacaaaatatgttattgattatcagatgacaagagattttttagataaaatcaatcatattcctcatcatccacttgttgtattctttggaagtattttattatttattattcttttatcaattatgtattatcgtcaagaacatgatattattcaacataagatgaatatggttttgagttttgttgaattgttgatttgttttggtattatttatttattgtatatgggatataatggtattattttattagtgttttgtaatagtatatatcatttaaaagatgataaaacaacaaaatggatattaggtgctgttattcttgtttatttaatttctaattatgatgttttttcaacagttattccaatcacaaatccacaggcatactttcagatttttaatgcaaatataagaggaatgttgatggttgcaaagaatgtattagaaacattaaatatcttattatttattgtttatatgattctttatatagctgatcaaattcaagaaaatgagaatatttcaaaagaattagatatgattcatcaggtaaatagagaattacaaaattatgcagcggtgacagaaaaaattggtgaaaataacgagagaaaacgattagcaagagaaattcatgatactttgggtcatgctttgactgggattgcagctggtgtggatgcttgtattgcaatgatagatataaatcctcaagcaactaagcaacaattacaagttgtctctaaagttgtgcgacaagggattggggatgttcgtaattctttaaacaagttgcgtccaggtgcgttagaagctcatggctttaaaggggcaattgaatcaatgattgaagaatttatgagtgttagtgatttggaaattgtattagattatcgattagaaaaagtggattttgaaaatacaaaagaagatatattgtttcgggttattcaagaaagtattacaaattcacttcgtcatgggggtgcaacccatattgagattattatttatcaagaagattatcatttatatttaaagattcaagataatggtagtggttgtgaggatattcattatggttttggtttaaaacagatgcaagaaagggttgcagttattaatggtgaagtgacatatgatggacataatggttttttaacaattattaaaataccaatgcaaaggggagaaaattatgattaaagttgtgattgctgatgatcaagagcttattagagagtcgttaaagattgttttaggaacacatgaagatatacaagttgttagtgttgcaagtgatgggtttgaggttttagatattttaaaaagaaatccagtagatattattcttatggatattcgtatgccacatatggatggcgttatgtgtacaaaagcagttaaagaacaatatccgcaaacaaagattattattttaacaacttttgatgatgatgattttgtgtttagtgcattaaagtttggagcaagtggatatttattaaaaggggtaagtatggatgaattgtatcaatccattttaactgtttatcatggtggaggaatgattaatcctgatattgccacaaaagtatttagtatgttttctaaaatgtcacaaaacaattattctattcgtgttgaagatagtggaattaaagagataagtaaaccagaatggaaggttattcagcaagttggttttggcctttctaataaagaaattgcacaaaaattgtttttatcagaaggaactgtaagaaattatctaagttctattctttcaaaattgaatttaagagatcgtacacaattagctatatgggcagtacaaacaggacaaacaacaaaggattttgattatgaataaaaaagccatcattatattattatgtataggtttgattttcttacttatctgttggcctcataaggttgttattaaactgggaatatttgcgggaagtaattgggatgtgccaagtggtgatagttattatgttattgatcatgcaattgaaagatttgaaaaaaaacataagaatgttgaaattgaatatcagagtggcatcttaaaagaagattattcttcttggctttctcaacaaatattaaggggagaagaaccagatgtttttatgattttaagtgaagattttaatacgttaagttcattaggagcattaaaagatttacatggatttatgaaacaagatcatcagtttgatacatcactttattatcaaagtgttttacaggctggcatttttcaaaaaaaacaatatgccttgccttatgaaagcaatccaactttgatgtttgttaataaaacattattaaaaaaagaaggaatctctattccagataatgattggagtttagatgatttttatagaatatgtcaaaaagttacaaaagatagtaatcatgatggaattatagatcaatacggttattataattatgattggttagattctatctatggtcatgggggacaattatttaatgaagatggaacaatgtgttatctcaatcaacaatcagttaaagattcattagtctttttacaaaagttgacagctttaaatcaaggttatcgtgttagtgctgaacaatttgataaaggacaagttgccttttcaccaatgcctttatcacaatatagaacctataaaccatatccttggagagtcaaaaaatattctcaatttgaatgggattgtgtcaaaatgccttctctatccaatcaacaaggacatagtcaaatctctacattattaatgggattatcttcaagaagtcaacatgaacaacttgcttgggaatttttaaagacattaacttatgatcagcaaactcaaactgaattaatagaatactcacaaggtatctcatcattaaagacagtcagtgaatctaagcatacattagatattttaaaagaagaagctggtgatagtcaggttaatttgagtttacttaaagatgttatggaaaacgctatgaatcataatcaatttaaaaaatatgaatctgcccttaatttattaacaacgcatattcaacaaattattgataataatgctgatatagatacatcattaattgatttacaaaaacaaatgaatcaatatcttaaggattaaggggctgtaacgactaagtggtttttgaaccatttaggacgctcagtcctttttttctttgtgacaattgtcatataaagaggtgagatttgacatagtgattttatgacattcgacaactggaatgaaaacgctttaatgatagaatatgagtgtcttataaaggagggagaaaagtgaaatatgttgtcttagtcagtcatggattatttgctgagggattatttgatgctttaaagatgttggctggaaaaagagatgatgttattgctgttgggttacatgatggacaaagtgcagatgaatttgcccaagtatttaaccaggcaataagtcaagtaacaagtgatgatgagattattttgttgggggatttaattggtggttcacctttaacgacggcaatgaatgtgattgctgaacatcaaatgagtcaaaagacattagtcattggtggtatgaatttacctttagcattaacaacagtgcttatgaaagatgcttttgatcaagagtgtctaaaggaacagattttaaatgaagcacatggtgctttaaaggaatttaaagttgttagtgatgatgaggaagatatttaaaaggaggagataataatggcagtaacttttattcgtattgatgatcgtatgattcatgggcaaacttgtacacgttgggctagagaatatccttgtgatggattgattgctgtaaatgataaagccgcaacaaatgatgttttaaaagctgcttataaagcagcaagtggtaaaaaaacatttgtctggacattggatgattttaagaaaaaatcagctaaagtacttgcaagtgatacacgttatttcttaattgctaaaaatcctatagacatgtgtaagattttagttgaacaaggatttcaatgtgatattgatacagtgattgtaggaccttgtaatgatcgagaaggggcaattaaattaggtaataatcaatcgattactcaagatgaagctgatgcttttgagaaaatggcaaaagctggttataagattaagttcgcattacttcctgatgtttctattggaacttgggatgattttaaaggtaaatttggatactaataagaggggagaaaaagtatggaaattagttggttacaagcagcattgcttggattatttgcttgtttatcaagtatgcctggacttggtggaacttcagttgggaactacactttagggagaccattagtcggaggtttagtatgtggaattattttaggtgatattgcaactggtattttagttggggtagctatgcaagttgtttatattgctttagttacaccagggggaacagtttctgctgatgttcgtgcagtcagctatattgggattccattggcaatgattgcgattaagagttatggtttagatgcagcttcagctgatggggcagctatggcaacttcatttggaacaatggttggaactttaggaacagttttattctatggaacagcaacaattaacttggcatggcaacatgttggatggaaagccgtagaaaaaggtgattttaagaaactatatgttgttgatatggttttaccttggatttctcatattatttgttcatttattcctacattgattatgtgtaaaatgggtgctcctatggttgatatgattaaaacatatttaccaatggatggtgttgcaatgatgacattatttactgtagggtctttattaccttgtgttgggattgcgattttattaaaacaaattgttacaaaagcaattgattttattccatttttctttggatttactttagctgctgcattaggaatcaatttagtgtcagcaacagttattgctggtatgtttgctttaattaactatcgtattaaaatgttgactgtacaaaaaagtgcaacagttgatgtagatgatgacgaggaggatatttaaaatggataaaaaattaagtaaaaagactctaacgaaatcatttcataattggtattatggaaacttgacttgtttttcacaggaacatatgcaaacatttggttatttatgttcaatgttgccaattgtagaggagttatatcaagataaagaaagtcaatcaaaatcaatgaaaacttatacagctttctttaatactgaaccacaagttggatcagtgattgttgggatgacagcaggtttagaagaagctagagcaaatggtgcacaagatgttgatgatgaaacaattaatggtttacgtgcagggttaatgggacctcttgcggggattggagattcattagttgtaggaactattattcctattttacttggggtggcaatgggaatgtcaacaggtggttcaccacttggcgcaatattctacattgttgtttggaacttgtttgcttattttggaatgaagttcttatattttaaagggtacgaattaggtggaaaagctgttgatttcttagttggagcacaaggtgaagccttaagagaatcaattactatgttaggtggtattgttattggggcagttgcagctacatgggtcaatgtcacaacatcatttactttgattgctgaaggggctaaagaaccttatttagaattacaaaaaacattaaacagtgtttatccaggatttttaactgctgcttttgttatgttatgttggtatttactagcaaaaaagaaaatgtcaccaattaaagttatgttattattagttgttattgcatttgttggtgtcttattaggattctttaatccaggtttaaaatactaaaaaagagacttatcatggaaactcaaatcaaacaatcatatattaaagaaattcaatatcaaacacaaatgatgaatcatttacaaagatggttaagaaattctattattttttcctcaatatccttagttcttgttttatttggaccatctttacattttgcattaagtattataggtatcataagtatgattataagtattcttgcttgttttgtgattggacttggtttgaagaatggtaaggataatatccaaaaaataattgattatataaaatgataaaaaatgctttatttcaattactggaataaagcgttttatttatggagggtagaatatgtatcgtattgtctttagtgatattgatggaacattattaaatgaacaacatcaaatgacacctttaacacgtcaagcaattttagatttacaatcagatattccttttgttattgtatcagcacgtagtccatcaggaatatatccaattttaaaagagtatcaattttattgtccaattattgcctatagtggagctttgattttagatgataagcgaaatatcatttatgaaaaagcaatgaaattaaatgatgtgaaagcaattattgattatatagagaaacaaaattatgatttaagttggaacttatatgcatatgatcaatggtttgttaaagataagaatgatcctagaattattcaagaagaacaaattgtaaaagcatcttctttagaaatagatttattcacatgtgatatatcttgcgtgcataaaatcttatgtatttgtcatcctcaatcattagaaattattgaaagagatttaaaagctcaatttcctcattgtacaattatgaaatcatctgaccatttacttgaaataatgagtgaaggaatatctaaagggaatgcagtggaaagaatgtgtcaattgtggtcaattgatttaaaagatgctatagcttttggtgatcaatataatgatttggatatgttacagagagttggttatggctatgcaatgggaaatgcacctgatgaaattaaaaaggcagttgaaagagtgactgatgattgtaatcatgatggaatttataaaattttaaagcaactaaaaatcaaatgattttcatttgtagataggtaagcgtataataggtgtaggaggttttttaaaatgaaaagattattaaattgtacatctagtgaaatggttaatatgaccaaagaagaattaaaacaatctattttagcgtgtgaaggaagaactgtcatgacagaaacagttgtatcaattccacctttacttggagatttaacaaatgctgaacttgcagtatcttttggtagtgatatggttttgttaaatgtatttgattgtaacaatcctcaaattatggggttacctgaaactgatgaacctattaaactcttaaagaaattaattggtagaccagtaggatgtaatcttgaaccaattgatgaagatgcaaagatgatggaaagtcgtcaagaaataagtagtggacgtcatgcaacaaaagaaacatttatcaaagcaaaagaacttggatttgattttatttgtttaacaggaaatcctggaaccggagtcagcaatgcttctattgaaaaagcaattcaattagcaaaagaatattttggtggaatgattattgctggtaagatgcattcttctggaattgatgaagaattagtagatttagtcagtattgaaagatttattgatgctggagcagatattatcttaatgcctgcggtttatactgttcctggtttatctgaagaagaagtgagaaatgcttgtaagttaattaaatctaaaggagctttatcattaagttcaattggaacttctcaagaaggtagtgatgaagcaacaatcagagaaatagcattagtcaataaacgttgtggtattgatattcaacatatcggtgatgctggatggtgtggtattgctttaccagaaaatattatggcattatctattgcaattagaggaaaacgttggacatatcataaaatggcttcatctattaatcgataatagttattgtagttggtaagtggctacaagtaaaaataactatctctaactttgttaaatgagatagttatttttatttggcttatgactagtgaaatgttagaagtaagtaaaaagaaacagttttatctgtttcttttaaggaattgaatcagttatttttcttcatattttaaggctttttgaccttgagcacctgaggaaatcctaataacattttcaacatcataaacaaatatttttccatcaccaggatgaccagtataaagaactttttttgcgacattgacaaccttttcaacaggtatatcagaaacaacaatttcaatttttaattttggtaataattgcatattcactttggctccacgataatatgatgtttgacctctttgaataccacatccagagacatgggttgcagtcataccagtaataccaatgccatccattgcacgttttaagacctctaatttttctggtcttgtaataataacaactttactcaatagtgaagatgttttttcatttaatataggggaatttaatggaatatcatgtgatgtttctaattcatttgatggaagcatattatgacgtggatcaaatgaaacatccatagcaaatcctgcataagcactttctaatccatgttctaatttatccaaaccaacaatttcttcttcctcactaacacgtaaaccaatagtatgtttaataatcaaaaagacaattgtcattgtcacagctgtccataaggcaactgcaccaataccagtgagttgagtgatgagaaaatcaaatccaccaccatagaataacccaagagctttaggcattgtatctgttccacaagcaaataacccaacacaaatagttcctaacaatccacatccaccatgaacagcgacagcaccaacgggatcatcaatttttaatttataatcaagtaaccatacaacaaacacaacaaccaatcctgctaaaataccaataatagcagcaccaaagatattaacagcatcacaacctgctgtaattgcaaccaaaccagctaatgaaccattaagcgtcatagcaacatctggttttccatattttatccatgtaactaacataacagtacaagtcgcaagtgctggagcgacagttgttgtagaaaaaatggtagctaattgtaatccattttttgctgctgctccattgaaaccataccatccaaaccaaagaatgaaacaacctaaagcaccaattgttatattgtgtccaggaatcccatttggacttccatctttattaaactttccaatacgcggacctaatattttagcaccaattaaggcagtaataccaccaaccatatgaattgcacatgatccagcaaaatcatggaatcctttttgtgctagccagccaccaccccaaatccaatgggcttcaataggataaacaatcaaactaatgataatactgtaaatacaataagctacaaattttgttctttcagccattgcacctgaaacaattgttgcagctgttgcacaaaagactaaattaaaaacaaaagatgaccaatctgtaccagtaaaattaaataaaggattttcaccccaaccaaataaacctccaacgtcagtcccacataaaaatgtataaccaacaattaaaaatgcgacagtccccaaacaaaaatccatcaagtttttcatgatgatgtttcccgcatttttagctctggtaaaacctgcctctaccatggcaaaaccagcttgcataaagaatactaaggcagcacccatcaaataccaaattccaaaaacttcattcaaaatctcttgcatattttctccctcctaaaaactttattcctatataagaaaaaggcggattttaaagttttcactttaaaaacacgcctttgtgcttatataagttatacatttacaaaaaaagcttctgatacaatttgtatcaaaagcgtctttgcttatgtatgggcataatataacaaagactttttaaaaagtcaacaagaaattctaaataaaataaacttttttattttatttgtaaaaaagacaaatgattaataaataattattatactaaaaaaatattgacatcatttgttaaatcgcttatgataaaaaacatagatatatggggcgcataaagatgaaatcaatttcatttctttatagcgcctttttatatatttgaggaggggaaaatatgaattatacgattgaagatatgaagttgtttttaaaagaacatgatgtacaatttattcgtttggttttttgtgacgtttttggaaatcaaaaaaatatatctgttagaccatatcaaatagaagatattattgaaaatggtttagtatttcaaggaggattgtcaaaaaatcaaaagatattattaaaacctgatttgacatcacttgatattttgccttggcgaccacaaagtggcagtgttatacgtttcttttgtcagatttgtgatgagaaaggaaatgtcttagagagtgatttaagaacattactacaaaatcaacaagataaaataaaacagaatggtcttgatattaaactacaattaggaacatcgttttatttgttaaagaaagatcagtcacttattgttccacatgatgaagcaggctatttggatgttgcaccaatggatcaaggagaagatattcgtcgtcaaatatgtttgaatttagatgatatggcaattcaaacatcattatcatatcatgattatggacctggacaaaatagtgttgatttaacatatcaagatgttttaacagcctgtgatcaatttattacattgaagtgggctattcaaacaagtgctgatttgtatgatttaatagcttcttttggggaatttgaagaatggcacgaaaatgctttgcatatgtgcttttacattcatgatgaaaaaacatgtcaaagtttttatgaaggaatctgtaaatatagccaagatatatgtaagtttttaaatttatccaaagaacctttagattgtgtgttatcaaatcattgtattgaattcatatcaatacgaccaacatgtcaaccttatcttgtgacttatcttttcttaatggcgggactttatggtataaaaaaagtacaaacaaagacttttatccaagatattctgtcaccaactttattggaaagcttagctaagaaggagtaagaatatgttatcatgtcttgtatgtacttcaaaaaatgatcgatttcaagccataaaatcattgattttcaatgtttctaaaagtgaagtgatgtgggctcaatatcaagaagatattgctaaaaacttagccaattcagtagtcgatgttttcattattgatttaccctatataggcgatcatcatgaaatgcgttttgtgatgtctttacatcaacgatatcctgatatttgtatgataatactagtagcacatcaatatatagataaaattcaagaacagattgagggattaggtattttgatagttgccaaaccattgcaaagagatatatttaaacaattcttgacttttgtgtctaactaccaatgtcatatgaaaaattatcaaatgcaacaaaaaaaactcctgaaacaaatatcggagatgaaacaattttatttagcaaaatgtttattaatggaaaatgaatatatgtcagagagtatggctcatcattatattgaaaaagaagcaatgaatcaaagagtaccaaaaataacaatagttaaaaacattatcaataaatatggaagggattgattatcaatccctttcaacttcattttcataaagtgatgttacataatgaccattaaaacatgccatacataaatcacatgtatgttcttttttaaaatgaattgatttttttattccttcttcagaaataaaatacaaagagtcagcaccaatatattggcacaattcatgaacatccattttatgagagataagctcgctttgtgtggatgtatctacaccatagaaacaaggatatttaattgctggtgaggcaattcttacatgtacctctttggcaccagcatctttaagaagttttacaatacgtttagaagttgtccctctaacgatggaatcatcaatcataataacacgcttattattaacaatagatgatactgctgaaagtttcatacgaacaccttgactacgtaattcttgagttggttgaataaatgtacgaccaacatatttatttttaattaatcccatctcataaggaatcccagctgcttcagaatatccgatggctgcagaaatagaagaatctggcaccccaataacaatatcggcatcaacatgagattcctgatacaattgtttaccagcaagttttcgtgtcgtatgaacattaatgccatcaagatcactatcaggacgagaaaagtaaatgtattccattgcacatattttatcttgaataggctcatcagtgtaaagcattgataataactttccatctttgactctcacgatttctccaggttcaatatctcttaaaaattttgccccaactatatctaatgcacatgtttcagaagcaaaaacataacttccattaggcaattgtccaatcgatagaggtcttaaaccatatttatctctcactgcataaagacgatcttctaacataatcaataaagcaaaagcaccatctaatctttgtaaagcttgacaaattctttcaatcattcgtccattttgacgtttaatcaaatgtccaatcacttctgtatcagaggatgatgaaaaaatacttccctgaatttctaattcatattttaaaagatttgcattgacaatatttccattatgacaaatccctaagtcaccttgcatagttctaaagagaaatggctgtacattggcaattcccccaccaccagccgttgaataacggacatgaccaattgccatatccccacttaatgcttgaatttgagaagcgttaaaaacttcagtaacaagtccttctcccttatgaacagttaatttatgttgattagaaaccaaaattccagctgcttcttgaccacgatgttgtaggctatgtaatccataataacaaatttgtgcagcgtctttatgatttgcaataccaaaaactccacattcttcatgtaattcttttaaatcatacatatgttattgtcctccttattttttgattatacgtctggtcatcataataatcaataaaaaattattgatataataattttttagcaaaaactattgacatttttcaaaaaacagtgcataattcaaggcaagtaagcgacaagggagtcgagacagaaatgttttgacccctttgtcgcttattttagtataacaagaaggagtgattatatgagtaaaagtattacagaattatttggtgaattagtttttgatgaagatacaatggaacaaagattaccaaaagatacctttagagaattacaaaaaacaatgaaagaagggcgttctttaaatattaaaattgccaatgcagtagctaatgcgatgaaagattgggcacttgaacatggtgcaactcattatacgcattggtttcagccaatgactggagtcactgctgaaaaacatgatgggttcattaatgtcaatggtaaaggaaaagtaattttagaattttctggaaaagaattaattaaaggcgaaccagatgcttcttcttttccaaatggaggcttaagagcaacttttgaagcacgtggatatacagcatgggatccaacatcatatgcttttataaaaaataatgttttatgcattccaacagctttttgttcttattcagggcatgccttagataaaaaaacaccattattaagaagtatggaagcagttaataaacaagctttaagaattttaaaattatttggaaatgaaactgtaaaatctgtaaagacgactgttggaccagagcaagaatatttcttagttgataaaaaattctatgaacaaagaaaggatttaatttatactggaagaacgttgtttggagcaccttcaccaaaaggtcaagagatggaagatcattattttggtactattaaatcaagggttcaagaatttatgaatgatttaaataatgaattatggaaattaggtattttagctaaaactgaacataatgaagttgcacctgcccaacatgaattagcacctatttttacaacaactaatattgcaactgatcataatcaattaacaatggaattaattcaaagaattgctaagaaacatgatttagtagctttattacatgaaaaaccatttgaaggtattaatggaagtggaaagcataacaactggtcactttcaacagatacaggaataaatctattagaaccaggtgagactccacatgaaaatgcacaattcctattatttttatgtgcagtattaaaagctgctgatgaacatcaggatttattaagattgtcagtagcaacagctggaaatgatcaccgtttgggggcaaatgaagctccacctgctattatttcagtgttcttaggtgatgagttaacagaaatcttagaagctattgaaaatgatcaaccttatgatggtaaagaaaaagaaattatgaaagttggagcacatgttttacctaaatttgctaaggatgcaacagatcgtaatagaacatctccttttgcttttactggaaataaatttgaatttcgtatgttgggatcaagtgcttctattgcaggatgtaatattgtattgaatacagccattgctgatgaattaaaacaatttgcagatgttttagaaaaagcaccagattttacttcagcattacatgctttaattcaaggtacaatcaaagaacataaacagattattttcaatggtaatggatatgatgagagttgggttgaagaagcccaaaagagaggattgttgaatttaaagacaacacctgatgctttaccttattttataaaagaaaataatattgaattgtttaaaagacatcatgttttggatgaagaagaagtaacttcacgttatgaaattatgatggaagaatatgtcaaagtattaaacattgaagcattaacaatggtagatatggcaaagaaagagattctaccagctgtgtctttttattcaaaaagacttgcagaaacttgtttaatgaaagaaaaattggtttctcaacaacaatgttatgaaaaagagacattagaaaaaatgacacaattattaaataaggcatatcaagctttaactcatttagaaagtatcttagaaacttcaaaaacaatcaatgattttgagcaattagcatttttctaccgtgataatcttattttagcaatgaatgatttacgtgaaccatgtgatgaacttgaaacaatgactgctcaagatatatggccattccctacatatgggaaactcttgtttggaattatctagaatataaggagggaatcaatgtgtgttctatcatgggatattgtgccaaagatgtaccgttagatttatttaataaagcttttaaaaaaaccttatcacgaggaccagatgcaacaagagtgcttgatactggggagggagtgttaggattccatagattatcaattatggggatgaataatctaggaatgcaaccatttaagtatcaagaatgttatgttgtttgtaatggagaaatttatggttttcgtagattaaaaaaacaattagaggaaaagggatttcaatttatgggggatagtgattgtgaaatcctccttcctctttatttagaaatgggaacagatatgttttctattttagatgctgagtttgctttaattctttatgatggaagaacacatgagtttattgcggctcgggatcctattggtattcgaccattgttttatggttatgattgtcatcatcaaattgtatttgcttctgaggctaaaaacctcgttgacttatgtgaggaagtttttccgtttcctcccggtcattattatcaaaaaggtgaatttatttgttatagagatataagtcaggttgaatcttatcatcaagatgatttagaaacaacttgtcaaaatatccatgatttattgataaaaggaattgaaaaaagattggatgcagatgccccaattggttttttattaagtggtggattagattcttccttggtttgtgctatagccagtcgtttttgcaagaaacctatttcaacatttgcaattggaatgcaagaagatgctattgatttaaaatatgctagagaagtcgcagaatttattcatagtcaacataccgaagtcatcattacaaaagatgatgtcattgccgcaattgagcctgttattttgactttagaaacatatgatattacgacgattcgagcatctatagggatgtatttgatttgtcgttatattcatgaacatagtgatgttcgtgttttattgacaggtgaagtttctgatgaattatttggttataaatatactgattttgcgcctaatgctaaagaatttcaaaaagaagcacaaaaaagagtaaaagaactttatatgtatgatgttttacgtgctgatcgttgtataagtgttcattctatggaagctagagttccttttggagatttggattttgttgattatgtgatgcatattgatccaacgttaaaaatgaatacctatggaaaaggaaagtatctattgcgtcatgcttttgataaaggatatttacctcaatctattttaatgcgtgaaaaggctgctttttcagatgctgttggccattctttaagtgatgaaattaaagcatatgctgaaaaattatatacagatgaagaatttgaaaagaaaagagaaaaatattcttttgcgactccttttacaaaagagtcattactatatcgtgaaatatttgaaaaatattatccaaatcaagcacatatggttaaagatttttggatgccaaatccacattggaaaggatgtcaagttaatgatccatcagcacgtatgctttctaattatgggaaaagtggagaatagaaaggatgagagaaatgcaaaatggaaatcaattagattatacacgagaacatgatgcttgtgggattggtgcagttgttcatattgatgggcatcaagattatagtgttgttgatcaagcattagcaattgttgaaaaacttgagcatcgtgcaggtaaagatgccagtggcgaagttggagatggggttgggattcttttacaagtttcacatcatttcttttataaaaaagcaaaagagcttggcattcaattaagcaaagcaggtgattatggggttgggatgtttttcttccctcaggatccattaaaacgtcatcatgctatgaaattatttgaaagaattgctaataaagaagggggacaattcttaggatggcgtgaagttccttgtcaaaaagagattttaggaaagaaagcaaaagaatgtatgccatctatttaccaatgttttattgaaaaaccaaaaacatgtcaacaaggcttgccatttgaaaggttattgtatgttataagacgtgaatttgaaaaatcatgtcctgaaacttatatctcatcattatcttcacaaactattgtttataaagggatgtttttagttgatcaattacgtttgttctataatgatttacaagatcaggattatcatagtgctattgctttagttcattcacgtttttcaaccaatacaactcctagctggcaaagagctcatcctaatcgttttattgctcataatggtgaaatcaatacaatcaaagggaatgtggatcgtatgctggctagagaagaaacattgcattcaacatattttcaaaaagatctatcaaaaatttttcctattgtagatacgcaaggttcagattcagcaatgctggataatactttagaatttttgtatatgaatgggatggatattgcaaaagccttgttaatgttgataccagaaccttggaaaaatcaagcaatgcctcaaaataagaaagatttttatcactattatgcaacaatgatggaaccttgggatggaccagcggctattcttttttctgatggtattaaaatgggagcattacttgatcgtaatggtttaagaccagcacgttattatctcttagatgatcaaactttaatactttcttctgaagttggtgttttggatatagatgaaactcatatcattaaaaaggcaagacttgaaccgggtaaaatattacttgtagatactcaaaaacaagagttaattgaggataatcaatgtaaaatggactttgccaatgaacattcttatggagaatggttaaattattatgtgatgcatctttctgatttacctgcaccagataaaaaaatacgtattcatacccaaaaacaaagagatgtgctatataaaacatttggttatacatatgaagatgtgaaagatcaaattttaccaatggcacaaaataatgttgaacctattgcatctatgggaacggatattcctttagcattaatgagtcatacacatccatcattatttcattattttaaacaacaattcgcccaagtcacaaatccacctattgattcattaagagaagaagtggttgttgatacaactgtatatttgggttcacatggaaatcttttggttgatcaaccacagaattgtagagttatagagataaataaccctattttagatggtcgtgatattgaaaaattaaaatcaattgataaacctggttttaaaagtcatgtgatttctttgttgttttataaaggaacatctttaaaagaagctattgatcatttatgtttagaggttgataaggcaatttatcaaggggttaatattttgattttatctgatcgagggattgatgaaaatcatttaattattccttctttattagctgtttcagcactagagagtcatttggttaaaaccaaaaagagaacagctgtttctcttgttttagagagtggagaaccaagagatgttcatcaatttgcttgtttattaggttttggagcaagtgctatttatccttatttggctcatgaatgtattatggaaatgatttccttagatatgcttgataaagaagaaaacagagcaattgaaagttataaccatgcgattttaaaaggggttgtaaaaattgctgcaaagatgggaatttcaactttacaatctcatcaatcagctcaaatttttgaaaccattggtttgagtaaagaatttatgagtgaatattttccacatacaacttatcacattggaaaattaggaattgaagatattgaaaaagatgtccgttatcatcatgatcatgcatttgatttattaggattaaaattagatacatcattagatagtcttggatttcataaatttagacgaggagagcagaaagaaaaacatttatatacaccagaaacaatcattttattacaaaaagcaactcaaacaggtaactatgcattatttaagcaatatacaaaacaacttatcaaagaacagacattttctattcgtcatctgttatcttttgatacaagtcagtgtacacctatttctatagatgaagtggaaagtgttgaaagtattgttaaacgttttaaaacaggggctatgtcttatgggtctatttctaaagaagcacatgaatgtcttgctattgcaatgaatagattaggtggaaagtcaaattctggtgaaggtggagaagatagagaacgtttatatagtgaggctaatagtgcaattaaacaagtcgcaagtgggcgttttggagtgacaagtgaatatttggtgagtgcaaaagaaattcaaattaaaatggctcaaggtgctaaacctggtgaaggaggtcatttacctggtgggaaagtatatccttggattgccaagacacgttattcaacaccaggagtcactttgatttctccaccaccacatcatgatatttattcaattgaagatttagctcaattaatatatgatcttaaaaatgctaatgatcaggctcgtattagcgtaaaacttgtttctgaatctggagtagggacaatagcatctggtgttgcgaaggctggtgccgatgtcattttgatttctggttatgatggaggaacaggagcagcccctcaaagctcaattcatcacgctggtttgccttgggaacttggtctaatagaagctcatcagaatctcattgaaaatggtttgcgttcacaagttgtcttggagacggatggaaaattgatgagtggaaaagatgttgctattgcagctttgttaggagctgaagaatttggttttgcgactgcaccacttgtaagtttaggatgtatgatgatgcgagtttgtcatttagatacgtgtccagcaggaattgcaacacaaaatgaatgtttaagaaaacgtttcaaaggaaagccagagtatgttatgaattttatgcgctttgttgcgatggaattacgtgaaattatggctgaattaggctttaaaacagtgaatgaaatggttggacaaagacaatgtttaaaaatcaatgaaaatttgcaagaccatcaaatgattgagttagataaactcttttctccttgttctttaaatgtttatcatcaatcaaatattcattcaattccacaaaatcaaacccttgataagagtgttttattgccacattttttaccttactttaagaaatatttaccgcatcaagaaacgatttctatttcaagtttaaaccgtagtgtaggaactttattaggtagtgaaatgacacgtatgtttaaaggacaaattcaagatgatatgtatcaagttcattgttatggtggagctgggcaatcttttggggcatttgtgcctaaaggattgactatgactatagaaggtgatgcaaatgattattttggtaaaggtttgtcaggtgggaaacttgcgattttcccttgtaaacaggcaaattatacagccaaagataatgtcattataggaaatgttgcactttatggtgcgacttctggagaagcttatatctgtggtcaagcaggtgaacgttttgctgtacgtaattcaggggcgattgctgttgttgaaggttgtggagaccatggattggaatatatgactggtggaaaagttttagtattaggaaaaactggaaaaaactttgcagctggaatgagtggtggaattgcgtatgttttagatgaagatcatgatctttatttacgcttaaatgatgaacttgtaatgatgagtgaattaaatgatataagtgatcaagaagatgtcaaaaatttattaaaaaaacatataaaagcaacatcatcaaaattagcaagagatattttagatgattttgataataaaaagaaacattttaaaaaggtgattccaatcgactatgctcatatattagaacttgttgagatggaacaaaaacaagggtatcaacaagatgaagcagctttacgtgcatttttaaaagttcataaaggaggataaaagaatgggacaaaaagatggttttttaagatatcaaagacaagataatgaagtcattgaaccaaaacaacgcattaagaattttcatgaatttcatcatcctttagattctcaacaaagacgtattcaaggagcacgttgtatgaattgtggggttcctttttgccaggcagcaattgaaatagaaggtaaaataaccggatgtcctttgcataatttagttcctgaatggaatgatgagatatatcatggacatgatgctcatgctctttcaagattattaaagacaaatccttttcccgagttgacaggacgggtgtgtccagcattatgcgaaaaagcatgtatctgtggattgcatgacgaaccagtaacaattaaagataatgaactattcattattgaaaaagcttttcaagagcaaatgatgaaacctatcaaacctactgttttaacggataagaaagttgctgtagtaggaagtggtccagcaggattatgtgtggcttataaattgaatcaaagaggacatcaagtgactgtttatgaaaaagaagatcgtgtagggggattactgatgtatggaataccttcgatgaaattagaaaagtcaattatcatgcgtcgagtaaagatgatggaagaagaaggagttgtttttaaaacaaatgttgaagtaggccgagatataaccaaagaacaattattacaacaatatgatgctgttgttctatgctgtggaagtcaaaaagcacgagatttaaaagttaaaggacgtcaaagtcaaggaatttattttgctgttgactttttaaaagctgtcactaaaaatgaattggatcaaaaaccatgtccatcagctcaagggaaaaatgttgttattgttggtggtggtgatacgggtaatgattgtgttgcgacttgtattcgtcaaggttgtacttcagtaacacaaattgaaatgatgagtgctccaccaactgttaatcaaaaaccttggccacaatggcctaatgttttaaaggtagactatggacaagaagaaagccttgaagtttttcatcaagatcctcgcgtttacaataccattattaaagagtgtttgcatgataatggaaaattagtgggagtgaaaacatctaagggaagttttgttaatggaaaatggcaagaaaaaccagcaagtgaaaagtatttaaaagcagatttgttattgatagctgctggatttgaaggtgttttagatgggattcaagaagcatttgatttagaacttacatcacatcatacagttaaaacattaccacatcattatcaaattaaaaattctcaaatctttaccgctggagatatgcatagaggtcaatcgttagttgtttgggccattcaggaaggtttggaatgtgcaaaagaagttgattattatttaatgggatatagttatatgaatgagtagtgataaaattatgttggaataataaaaaattattaattttatcttgaaataatgataaaatttgtttatactgataaaaaaataaaagaaaggattgataaatatgatagttgtgaataaaacacatacaacaagaatcttattttcatatcttttctattctcaaaaaacatatcatgatgatatgtttttttctaaatgaaaggggaaactatgaaagcttatttaatattagaagatggtcatatttttgaaggagaaagttttggttcgacaaaggaagttatttgtgaatttgtgtttaatacttcaatgacaggctatgtagaagttttaactgatccttcttatgctggacaaggtgttgttatgacatatccattaataggaaattatggagtttgtttagatgatcaagaatcttctcaaccacatgttgaaggctttgttgtgaatgaattgtcaagaaaaggaagtcattttaggaaacatatggaattagaagattaccttattgaaaatgatatacctggtattcaaggaattgatacgagatatcttactaaattgataagagataaaggttgtatgaatggtatgataacgacaacttattatgatgatagaagtaaagttttagaaaaaataaaagattatagagttaagggtgttgtagagaaaacaacttgtcaaaaagcttatactttaggaaatggtaaaataagagtggctttatatgactttggtgctaagaaaaatattgctatggaattggttaaaaggggatgttgtgtgacagtatatcctgcttggactttggcagaggatatattaaaggaaaactatgatggagttatgttatcaaatggtccaggtgacccaaaagaatgtcaagcgattattcaacagataagaatcttaaaagagagtcatattcctatatttgcaatatgtttaggacatcaattgatggctttagctcatggctttgaaactgaaaaattaaaatatggacaccatggagctaatcatcctgtcaaagatatgaatacaaaaagagtatatatatctactcaaaatcacaattatgttgtgaaaaacatagataaaaagattgctaaaacatggtttttaaatgttaatgatgacacaattgaaggaattgaatatttaaaagagaatatcaaaactgtacagttccatccggaagcatgtgcaggacctacagacactggatatttatttgatgaatttatagaaatgatgggaggtaatcaaaatgcctaaaaacaaaaatattaaaaaggttttagtgattggttcaggtccaattattattggacaggctgccgaatttgattatgctggaacgcaagcttgtcgagctttaaaggaagaaggagttgaagtcgttttaatcaactcgaatcctgcaacaatcatgactgataaagatattgctgataaagtttacattgagccactaacagttccagttgttaaacatttaattgaagtggagaaaccagatagtttactgcctactttaggaggtcaaaatgccttaaatatagcaatggcattgacagatgaaggttttttagaaaagcatcacgttcaaacaatagggacatctacaaagtcaataaaacttgctgaagatcgcttggaatttaaaaaaatattggaaagtattcatgaaccttgtgctccttccattgtggttaatcatgtagatgatgctttagaatttgcgcaaaatattggttatccagttgtagtgagaccggcatatacattaggtggaacaggtggaggaattgcgcataatgaaactgaacttcatgatatttgttcaaatggtttaagactttcacgtgtcaatcaatgtttaattgaaaaatgtattgcgggatggaaggaaattgaatatgaagttatgcgtgatagtgccggcaattgtattacggtttgtaatatggaaaatgttgacccggtaggtgttcatacaggtgatagtattgttgttgcaccaagtcaaactttaagcgataaagaatatcagatgttaagaagttcagcatttaatattattcaggcattagatatccaaggtggatgtaatgtacagtacgctttaaatccaaatagttttgaatattgtgttattgaagtgaatccacgtgtatctcgttcctctgccctagcttctaaagctacaggttatcctattgctaaattagcggcaaaaattgctttaggatatcatttagatgaaattaaaaatgccgtgactggaaaaacatatgcatcttatgaaccaactttagattacattgtttgtaagattcctaaatggccttttgataagtttgttggagcttctcatgaattaggaacacaaatgaaagctacaggagaagtcatgagtatttcccagtgctttgagggagctttaatgaaagcaattcgttcacttgaactaaagattcttgatttacatattcctgtattggaaaatatgtcaaaagatgaattaaagaaaagattggaagttattgatgatcaaagaatctttgtgatttctgaaagtttaaggaaaggaatcagtgaggaagatattcatcaattgacaaagattgatatgtggtttattgataaaattaaacatcttatagaagttgaacaacagttaaaatcagaagaattaacagttgatttattaaaacaagcaaaacgtttagagtttcctgatgaggtgattgctaaatatagtggacaaagtgaggaaacgattcaaaaaatgcgaaaaaatcatcaaattgttgctgtttataaaactgtagatacttgcgctgcagaatttgatgcttctacaccttattattattctatctatgggggtcataatgaagttgattttcattctcagcgaaaaaagattatggttttaggttcaggaccaattcgtattggacaaggaattgaatttgattattgttctgttcattgtgtttgggcattaaaaaaggctggatatgaaacaatcattgtgaataataatccagaaactgtttctacagattttgatattgctgatcgcctttattttgaaccattaactaaagaagatgtggcaagtattgtggaaagagaaaagccagatggagctattgttcaatttggtggacaaacagcgattcaattaacacaagctttaatgaaaatgggggttaagattttaggaacatcagcagataatgtggatgcggctgaagatcgtgaaaggtttgatgatatcttagaaaaatgtcatattgacagaccaaaaggttcaactgtctttactgtagaagaagcaattgagactgctcaaaaattaggctatccagttttaattagaccttcttatgttttaggaggagctggtatggaaattgcattaaatgatggagatgtgaaaacatttatggatattataaattgtcaatatcaagaacatccaattttaatagataaatatttggccggtaaagaagtagaagttgatgcgatttgtgatgaaaatggtgttttgattcctggaattatggaacatattgaacgtgctggggttcatagtggagatagtatttctgtatatccaacacaaaaaattaaaccagcaatcaaagatgtaatcgttgattatacacaaagattagctaaagcattgcatgtaatcggattgattaatattcaatttattgtctatgaagaacatgtgtatgttattgaagtaaatccacgatcatcacgtacagttccatatatttctaaggtaacagatattccggtagtagatattgctactaatgttattatgggaaaatcaattcaacaacaaggttatcattatggattggtaccagaaaagaatatagttgcagtcaaaatgccagttttctcttttgaaaaaattaaaggagcagaaattagtcttggacctgaaatgaaatcaacaggggaagtcttaggaattgcaactacttttgatgaagcgatacataaagcctttatagcaactggaattcaattaccaaagaaaaagaatattatttgtacaattaaagatagtgctaaagaagaattcttacctattgcaaagcaatatgaggcatttggatatattttgtatgctacattaggaacgtatgaatacttaaaggcacataatattgatgttcatcttatcaatagaattaatgaaaagtctaatacattatttgatttgatgttaagcgacactgttgatctggtaattgatattcctactagaaataataatttaaaggatggctttttaatacgtagatttgctgttgaagcaggaattcctatttatacatcattagatacagctcaagcattaattaattgtttagaaaaaagccaccaagaaaatttatctttaattgatgtggcacaattatagtttcatctatgaataggtaaaagatgtttgcttaaagtatattgacaatcgttcttttataacatataatgtaactgaaaaaaggaacagccgataagtggttatgccttggatttgttaagtagaaataactaccttactttaccagagcaggggtagttatttttttgctttcaattccttatctatgatgataagaagcaatttaacaattaaacttaatagtgctatgataaatgtcagcaatgccaacatcatcataacagcttcataagtattcatgttaatcacctccgtttttcatatttccaaatcattggatatctatgtcaacgaagattacgtaccttcgatctcacgaccaaggctaaccacctaccgctattgctgttcgcaaatattgtatcatataagtacatgaaaaatctattatgaaatttgtttaaagcaaatttctattggcaatatttttgctttaaaaacataattgttgtagatgagaatgattttcattattataataagaaaatgctgaagtgaaagtttatatataaaaaatatttgcttaaagcgtattgacaattactcttttacaacatataatgtatttgaaaaatggagcgaccaataagcggttatgccttggatttataacagtgaaaagtaactatctcacggtcgaccaaaacgcacgaggtagttattttttgcttttaattccttatcgataatgataagaagcaaattgacaataattcctacaaaagttatgataaacgctaaacaagttagcatgatcataattgtttcatatgtagtcatgtcaatcacctccgtttttcatatttccaactgagtggatatctatgtcaacgaaggttacgtaccttcaatcttacgacctcacactttactagagacagaggtcgttatttttttagatttatttgcagtgaaaaaggattggtggcataataatatcaattggagggataatgatggcagtgataggtattgatttaggaacaacaaatagtttagcggttgtttatagaaatgggaatgtagaattgattcctaatcaatttcatgaatatttaacaccaagtgttgtgagtttggatcataatgaattaattgttggtaaaattgcaaaagaacgtcttgtgactgatcctgaacatacaacatatttatttaaacgtaaaatggggaaaagtgaaaagactcaattaggttcaaaaagttatttgccagaagaattatcagcttgtgtagtcaaacaattaattgaagatgcacaaaattatttaggtgaaaaggttgatgaagttgttattagtgttccagcttattttgatgcaacccaaagacgagcaacaaaagcaattggggaaatattaggagtaaaggttaatcgtttgattaatgaaccttctgctgcagcaattgcttgtcatcaaagtgatgattttgaaacttttgttgtttttgattttggtggaggaacattggatgtttctgttgttgattgttttgaaaatgttgttagtattaatgcaattgcaggaaataatcaattaggtggaagtgattttgataaagcaattgcttattatttttgtcaacaaaataatattgattttgtatctttatcaaaagaagaacaaagaagtttattattatgtagtgaacgagcaaaactatcacttcaagattcatcgtcaataacaatgaaattaacattatccaaacatcaatatgtttgtgaattagataatgagattttattttcaattacaaaacatatctttactgaaattaaaaaagtgattgggaaggctgttaaagatagtggttttagtgctgaagaattagatagtcttattttagtaggtggttctagttatatgccagtagtgagagattatttaactcagctacttaatataccagtatcacaaagtgaagatattgatttattggttgctaggggacttggaaaatatattgggatcaaacaaagggaagcagatgtaaaagatttattggtgactgatatttgtccattttcgctaagtacaggtgtgcataatccaattgatacagctaaggatttagcagaagttattattccccgtaataccgttttaccagcaagtgagagcgttactttgcaaactgtcaaaaagggacagacacatgtcaatgttactgtttatcaaggggaagaaatgtatgccaaagataatttgtttttaggcagtgtcgatattcaagttcctcgtaattttaaagaacatgaacaatttcaagtcacttattcatatgatattaattcaatgttatatgtagaaattgatattttatcaactcaagaacatttcacatatcaaattggtcagactcaacgtttagaaaaagttacaaagtataatcatttaaatgctgttaaaaatgtttctctgcaattaaatcaaaatccagaatatgatgctttaatggaaaaagcaaaacgtatttttactgaattagatccagttacaaaagattattatcaagcaaccttacaacaatttattgttcattttaagcattaccataacaatattaaaaagaaacaagaactcttaacaattatggaagattatatagataaatttgaaaaagatatggattatgaaaatttagatatcttttcatcctttgatgatgaaggaggacttccttcatgaaaagtatatgggatattttaggaatagaaccaactcatgataagaaaatcataaaacaagcctatgcaagtcaaagtaaactttgtcatccagaagataacccagaagcttttaagattttacaacaagcttataaatcagcattagcttatgcatcaaacgagaattattcaaagacttctttaaaagattcaaagagttctttaaaaagtacaagtgaagtcaatacgaaaaagacacataaggtttatgttgatagtcaggatgagaaagaaacaaaagaggtttatcattattctaaggatgttgatttagatgatttagaaatagaatcttccttatcaaaaactcataagttatttaaagatgagaatatcctagaacagtttgatgataatcaagcatatcaggattatctatttgaaagttttatcaaacaaataggaaagcgattagatgaagataaattacaattacttgtagaaaatacgaatttattgattcaatgtcatgatcgatatttttgtataaaagtagatgattatttaagtcaatgtcattttcatttgaaaagattcagatatgcttattgggtgaaagtattaggtgacctgcattttgaaaaaacagctgagaagttaagaaaaattcaaattaaaaagaatcgtttgcctataagtgcctttttccctattattgtcgttgtagttatgagtattctttttgatagtccaactccaaaacaaaaaacacctcaatataaaccacaggttaatattgttaaacaagacactgttgatacaacaaatattgattattatacaaatgttcattatctgaatggggttagatatactaagaataaagatgaatatattcttaaaaataaagagggaaagattattgctagtgaagtaaagacaatacaatttacgaatagtccaataattctttatcaaaaaaataaattttatctacttgatacaagagatatgaaaacaatccaaagaacatataaagcagcaatggtagtcaatgttgtaaaagatggagtaagtcaaatagaaaagatgtatgtagcaagttatgatagttattattggaagttgtatgatttaaaggggaatgcagtttatcaatttgaagaaaaaagggatcaaaaagatatccctaaaacaatttatctgcatgatcaaaaggctacttttgagtcttaaaaatacttttcattatgcatatttaaaaaggcttgaaaaccaccttcaacatagtaagcgcgatatcctttttgttgaagttctctggagagcctttttgttctttctccactataacaaatcaaacatagtggtttatctttaggtaaataatcaagcttatttatgagtatatcataaggaatgttttcaaagttatagatgtgtaattgatcatactgatagctttctcttatatcaataaaataaaattgattttgataaactattttttcaagattataaatagaaattgcattattcattataagtcacctaccttaaagtattcaagagagcgaataatgttctgatagtgagaaattttacgaaatttgtgactaacaaataaagtgaatttgtggtataataataaaaacacaacgtgttgttaccgcaacgtaagttcagttggtgcaatacgttgttttgttttagaaagagaggtatttagatgtaccaagtgaatgaaatcattttatatggtagtgaggggatttgtaaaattgacaatatgatgacacgtcatgtcaatggtcaacctattgaatattatgtattaaaaccaattaagagtgagagttcaacaatttatgttccaactttaaatgaagaattaacgaagaaaatgaaaagagttttatcttatcaagagattattgatcttattcattttattcctgatagtgagcttttatggattgataatgataatttaagaaaagaacgatataaaggaattttaagagatgggaatcgtcaagaaattatgcagctgattagaactttatatttgcatcaacttaaattaaaagaagaaggaaagaagtttcatgcaagtgatgataaattttataaagatgctgaaagaatcttgtatgaagaatttgcctatgtattaaatatttctgaagaagaagttgttccgtttatttgtcaggagattgatgttaaagaaatagcatagatagaaagcaatatcttttataaagaggatattgcttttcttgtgttttttcgtcaaaatacgggaattgttaagaaaatgaataatttttcatgtttcattaggtggcttgctaattgcttcacataagatacaaaatcaattgaaaatcatggataagagtgttataattcaggcatggaggaatgtgaaaatggataagaaaacaatcaaagatattgaagtcgctggaaaaactgtcttagttcgtgttgacttcaacgtacctagaaacaaagaaacaggagaaattactaatgacaacagaattgttgccgctttaccaactttaaaatatttattagaacatgggccaaaagctatcgtgttgttctctcacttaggtaaagtgaaaactgaagaagacaaagctaaaaatgatttagctgttgttgctcctagattatctgaattattaggagtagatgttaaatttgtaaattgtacaagaggagcagaacttgaaaatgctgttaaagaagcaaataatggtcaagtgatcttagtacaaaatacacgttatgaagctggagaaagcaagaatgatccagaattaggtaaatattgggcatcattaggtgatgtatttgttgaagatgcatttggttctgtacatagagctcatgcttctacagctggaatccctgctcatttaccatctgcagctggtttcttagttgaaaaagaaattgcttatatcggaaaagctgtaagcaatccagaaagaccaatggttgctatcttaggtggagctaaagtttctgataaaatcttagttattgaaaacttattaaaaatcgctgacaaagttattgttggtggtggtatgacttatacattcatgaaagctatgggtcatgaaattggtaattctttagttgaagatgatcgtattgaagtagctaaagaaattatcgctaaaggtggagataaattaatcttaccagtagactctgttatcaataatgcattcgctgagtcaggtgatatcaaagtatgtggtgaagatgtacctgaaggatatatgggattagacattggacctaaatctgttgaaaacatcaaaaatgcattagctggtgcaaaaacagttatctggaatggaccaatgggtgtatttgaaatggaaccatttgctaaaggaacaattgctgtatgtgaagcattagctaacttatcagatgctaacactattatcggtggtggagatagtgctgctgctgttatgcaattaggatatgcagataaagtttctcacatttctactggtggaggagcttcattagaatacatggaaggtaaagtattacctggtattgctgcaattgatgataaataattagggagaaatgaaaatgagaaaaccaattatcgtaggaaactggaaaatgaataaaacaatcgctgaaacaaaagcatttgttgaagctgttgatccagcagtgaaagatactgctgattggggtattgcaactccatatttagcattacaaactgctaaagaaaacgctaaaaacttaatcgtagcagctgaaaactgtcattttaaagatagtggagcttatactggtgaagtgagtgttggaatgttaaaagaaatcggaattgaatgggttatcttaggacattctgaaagaagacaatattttggtgaaactgatgaaacagtaaatgctaaaatgttacaagttttaaataatgatatgactccaatcgtatgtgttggtgaaacattagaagaatatgaagcaggaacaacaaaagaagttgttaaaactcaaacagttgctgctttcaaagatgtatgtccaaaatgtgcaagcagagttgtaattgcatatgaaccagtatgggctattggtacaggtaaaactgcaactaatgaaattgctcaagatgtttgtggatatattagaagcgttgttgctgaattatatggacaagaagtggctgatcaagtgagaattcaatatggtggatctgtaaaaccagaaggattaaaagctttattagaacaaccagacatcgatggtgctttagttggtggagcttctttagtagaagattcatataaagcaatgattgctgcattagattaataaattagaactgctttggcagttcttttcttttattaagaaattcttaagaattgttttgttgacattaatttttaaaatgtttactatatgtttatacatggagggataaggatgaaatataaaggaataattggttgtttatgtttattgatgttggttggttgtggcacaacaaaaaaagaagaacctacgcaagaacaaaaaggactttatgttggtttagatggaaaacaaacatatagtgaagctgtaaaatattttaattcgcgtgtgaattattattttagtgaagcaacagatgaaacaagtgatacttataatgaatattataagggtcaagatcatatttcattagtgagtaaagctttatataaggatgcagatgtaacgacattaaattatagtattgctgatggaaaagatttccataccctctttatggttgatagccagacatatgcttatgatgttgcacatgattataatgagacaattgatgcaatgtatcctgatttaacaaaagatgaaaacagtgagttattaagtgctgaaagaaaagatcagaatggacaaattgaattaactcttaaagtaaaaagaaatcaacaatatcaagaaaatgattcaagtgaaattgtttattttgtgagtcaattaaagatttctaaagatggttatattgtggaagataaagtaacttattatactgatgataaatttgaagaagtggcatatgaaggtttaacaacgacatataaagattttaataaaaagaaatcagatgatttacaaaaagaaattgatttaatgaaatcatgtgatggaatgaatgatgatgaagtgaaaacagagcttcatttagagtcatagatttgtctatgactttttttctatcttttttacatgaattttgttatgatatagaactggtgagaatatgacaaaattaaaaagaaaagatttattatttttaggtttaacattattttcgatgttctttggagcaggaaatttaatttttccaccttttttaggtgagcaagctggcaatcaagcgattattgctggtttagggtttattgttagtgctgtaggtttacctgttttaggggttattgcggttgctaaggctgatggtttaaatactctagcaagtcgtgtacatccacgttttgctgatttatttaccttattaatttatttatctattggaccatgtttagctattcctcgaaccgcaagtacttcttatgagatggtgattgcgccattttttacgcaacaattcaaatttgtaccaattctttattcatttgccttttttgcattagcactttatttggctttgaatccagaaaaactatcagatcgtttaggaaaagttttatgtccattattattaactttaattacgattatctttttaggcagtttctttgttgaaattcattatgcaatgcctagtggaaattatgcacaacatcaatttgttcaaggctttttagatggttatcaaactatggatacaattgcagctttaaactttggaattattattgctttgaatattaaaaataaaggcttaaaagatgcaaaaacagttgtgaaatatactattaaagctggaatgattgctggtatttgtttagctattgtttatggagctttgattcatattggagctttatcttcttttgtaacgggacatcatagtaatggtgctcaaactttaacggcttttatgcaatatttatttcaaaatatggggattgttattttgggagccgttttctttattgcttgtttaaatacttgtgttggattgatttgttgttgtagtgagtattttgttgaaagatttgcttatttaagttataaacaatgggcttttgtttttgcggttgtgagtatgttgatatctaatattggattagatatgattcttcatatttccttacctattttaaacttactttatcctttatcgattgtcttaattttcttagcatttattcatcgttatattcaaaaatatagttatgtttatcaaatcacaatgttattgacggggattggaagtttattagggattgttcctaatccaattattcaatctattccattatcacaatattcattagggtggattccttttgcagttattggattgatattaggaattgttttatcaaagaaaaatattgataattaagcaatttttcttgttttgtcgattatcttgaaataaaccggaaatgtgatatactacgtattatccaaagattactaacaagtcattatgtcgagtaatgaacttgttttctttcatttaaggaggatttatgatattaaatattattttattgattgttggatttgttttattgattaaaggtgctgatgtttttgttgaaggtgcaagtaaggttgcagcgatgttacatatcccacagattgtcattggcttgactattgtagcttttggaacaagtgccccagaagcggcggttagtattgcttcagcttataaaggcactgctggaatagcaattgggaatattattggaagtaatattgcgaatgttttgttgattcttggggttgctggaatgattggtgaattggttgttaagaagaatacgttctttattgaatcaccatttgtgattgtgattactattgttttgttgtttttaggagtgaatggaaagaatattaatcgtattgatggtgcaattttatggatgttctttttagttttcctttattatctttatcgtttgactaaaaaaggtgatgatagtgcgattgatgatgtacctgaattggatcaaaatgatcgtttatggaaattaattattatgattgttttaggaattatttgtgttgtagtgggaagtcaggtaacagttgatgcggcaagttctattgccaaggaatttggagttagtgatcgtattattggtttaacgattgtttcgattggaacgtctttacctgaattagtgacttcagtgaatgcatcgctcaaagggcgtaatgatattgcgattggaaatattataggaagtaacatttttaatattttatttgtacttggaacagcagctttggtggctcctagaggaataccatttgctagtggatttatgcttgatggcgtgattgcgatagcggctgttgtgctctttatgttgtttgttggcaaagatatgaagcttaaaaagtatggtgcttttgtaatgttaatctcatatatttgttatgtggtgtatattttgtaaaaaaattcacgagggaaagggtttacataaaatgtaagcctttttattttggctttttgtatcatcttgcttgttttttcacaaggaatatagtatattagccatgtaaagaaaatataaattttggaggaaagaaaatggcagagaaaaaagctgtaaaacaagaagccccaaaggctgaattgactaatgaacaagtagatgctcatattgatgaattagttcaaaaagcattaggagccttagaaaaatttgaatcttttgatcaagatgctgttgactacatcgttgctaaatgttctgttgctgggttagaccaacatggtgtattagctgaagctgcagttaacgaaacaggtagaggtgtttttgaagataaagctgttaaaaacttattcgcttgtgaatatgtaacaagtaatcttcgtcacttaaaaactgttggaattattaatgaagatcctttaactggaattactgaaatcgctgaaccagttggtgttatttgtggtatcgttccaacaacaaacccaacttctacagttatcttcaaatctttaatttcattaaagacaagaaacccaattatcttctcattccatccatcagcttatgaaagttcagttatggctgctaaagtcatgagagatgctgcaattgctgcaggtgctcctgaaaactgtatccaatggattgaaatcagaggatctatgtatgcaacaactgcattaatgaatcatccaggtgtagcaactatcttagctactggtggtaatgcaatggttaaagctgcttactcttgtggtaaacctgctttaggtgttggtgctggtaacgttcctgcatatgtagaaaaatcatgtgtattaaaaagagcagttaacgatatcgtattatcaaaatcattcgataatggtatgatttgtgcttctgaacaagctgctatcgttgaccatgaaatttataaagaatttaaagaagaaatttctcgtttcaaagtttattgggtaaatgaagcagaaaaagctaaacttgaaaaatatatgtttggtgctgaagcttatagcgataaagttaatgaagtgggaactgtaaatgctaatgttgtaggtaaaaatgcaacttggattgctgaacaagctggattcaaagtaccagaagatactcaaatcttacttgctgaatgtaaggaagttggacctaatgaaccattaacaagagaaaaattatctccagttttagctgttttaaaagcaacttctactgaagatggtattgctaaatcagctgcaatggttgaatttaatggattaggacactcagctgctatccatactcaaaatcatgacatttcagttgaattcggattaaaatgtaaagcaattcgtgttatcgaaaatgctccatctacatttggtggtattggttctgtttataatgcattcattccttcattaacattaggatgtggatcttatggacataactcagtatcaaataacgtaagtgctgtaaacttattaaatattaagagaatagggagacgtaacaacaatatgcaatgggttaaacttcctccaaaaatctactttgaaagaaattcaattagatatttaagagacatgaaagtcatggaaaaagccatgattgttactgatagaggtatgtacaatcttggttatgtagataagattgaagatgttatcaagagaagacgtaataaagttgacttagaattatacttcgatgtagaaccagatccaagtatcgatacagttaacgaaggtgttgaattaatgagaaaattcgaaccagatgttattatcgcattaggtggaggttcttcaatggatgctgctaaagttatgtggttaatgtatgaacatccagaagttaacttcgatgatatcaaacaaaaattcatggatatcagaaaacgtgcattcaaattccctgaattaggaaagaaagcaagattaatctgtatcccaacaacatcaggaactggatctgaagttacacctttcgcagttatcactgataagaaagctaacaagaaatatccattaactgactactcattaactccaacagttgcaattgttgacccagaattcgttatgagtttaccagctgctattgctgctgatacaggaattgacgtattaactcatgcagttgaagcatatgtatctatcttagcatctgacttcactgatggatgggctaaacaagctgttaagttagtattcgaatacttagaaagatctgttaagaatggtaaaaacgatccagaagcaagagaaaaaatgcataatgctgcaacaatcgcaggtatggcattcgcaaatgctttcttaggtatgaaccactcattagctcataagatcggtggagaatggcatattcctcatggtagaacaaatggtatcttattaccacatgtcattagatacaatggtacagtaccaactaagttaaatatctggcctaagattgaaaactataaagctgatgttaaatatatggaattagctcaattaattggattaaatcctaagactccagctgaaggtgttgcaatgttcgctgatgcatgtgaagaattatgtgcaaaagttggtgttgcttgcaacgtacaatctcaaggtatcgataaagctgcttgggaagaatcagttcatagaatggcaatgaatgcttatgaagatcaatgtactccagctaaccctagaatgcctatggttaaagatatggaagcaatcttaagattaatctatgattatgaatcaaaatttgctgataaagcattaaagaaataataaataaccaaaatttatttgaaagacgttgcttcgtttgcaacgtcttttcttttatcgtaaaatagaagtaagaagatataaaacgaaagggaatgactatgaaactaagaaaaggtaacttaaaaacaaaattatgtcaactcgcattgataccagtcatctgtttaggcttagcaacattagttattgcctctgtgagtgtttatatatcaacagctaatgaaacaaaagatggtttaaagaatcttgcttatatgcttcatcaaatgtgtgatattgatggtgaaggagattattgggtaaaaggtcaacatttgatgaaaggtaatgatgtttttgataataattataagattgttgataatatcaaaagaacatctagtgtggatgcaactattttttatggtgatgtgagaatgattacaaccatccataatgatggtaaacgtgcaattggaacccatgcaagtttggctgtagttgatagtgtattgaaaaaaggaaatgattatttttctaggcaggtttctataggtggggtttcttattttggttattatacacctttaacgaatcctgatggtagtattgtaggaatggtctttgttggaaaaccaagaattgcggttgtagaagcagtgatggcaacagtcttttggattttcttattaactttacttgtcgctggttttacagttatgatgtcgatacattatgctcataaaattgtttattccttggataaaacaaaagagtttttaggtaatatagccaaaggaaatgtagaagaaaagattgatccaaatattttaaaacgtaatgatgagattggtgaaatggggaattttgcagttagtttgaagcaatctattaatcagcttgtaagtactgattcattgacagggttatataatcgaaggagctgtgaaacgattttaacaaagattattgaggaaaataagaaatataaaactaaatcagtgattgtgattggagatattgatttatttaaacaggttaatgatacatatggtcatcaaattggcgatcttgttttaaaagaattagcgattgtttttaaggaacatatggaacataaaggaattgttgctcgttggggtggagaagaatttatgtttatatatgagcgtatggatatggagcgagtttatgagcatttacaagaacttatgaaagctattgaaaatatgcagataccttataatgatgaaatgatttcagttggaatgacatttggggcggcattatgtggtcaagattgtaatattgatcagattattaaattagctgatgataatctttattatggtaagaatcatggcagacatatgattgttataaaatagatggaagtgataatatgtatattcaaacccaaaatcagtattctaaatttactactgatgaattaagtgagttattaggacaaacaacatttcaaattaataattttggtctatggacaagtgatcatgataatcaagcaagttatatttctaatgatattgagattgtttattatcaaaaaggtggttcacgtactctcgttgggaatcaatcttatcaatgtccaccaggaagttttcttattcttgaaccttttcaattaaatacatcaattaatgaaggatatgatgaatatgcttactattattttcattttgatatagaaccagtttctttaaaacatcagtttatgtctttacttacaaaacatggtcatttgatttatcctcatgaaatgaaaaactttgaagaaatgttgtatcgtctttatattgaatcacaagaaaaagaaatgggatattcaagtattattacatcggctttaattagagtggttgtagaaattatgcgagctcaattaaaacgtggacaagatgatcatattgaaatgatacattcaccttatattgaattagttaatgaggctatcacttatgttcaaattcatttgtatgaaccaatacgtttacaacagatggcacaaacattaggcgtatcttcaggcgtattatataaagcttttataagtgtgttatccttgtcaccagcaaaatatattcatcaacaaaaaatccaatatgctcaaaataaattattattaggagaaagtgtgacagctattgctcaagaactaggttattcatcagcttatcatctatcaaaagactttaagaagatagtagggatgagtccaagagattataaaaaacaacttcaacgtttgtgaaatattaaacatatacgaatttgtatatgttttttaatattttagatatgttttgtgtatgtgtaagtgttatcataagattatagaaaaaatgaggaggtagaatatgttattattagaaccgataaaagtagggaaaatcacattaaaaaatcgtattatgtttccaccaatgacaacggggtatgaagaaagagatggatctattggacaacaaagttttaacttttataaaagattagctcaaggtggagtttcttatattgttttaggagatgttgcgccagtgaatacagtttctccaactccaaaattattccatgatggtcaaattgaagcatttgctaagttggctaatgctctccatagttatgactgtaaattaggaatacaaatttttcatcctgaatatgatgttgatgccttggcagaaatgtttaaaaaaggagatatgcaagcagctcgtgcaaaacttcatcatgatatgctgcattatattgatgaagtgactgaagaacaattatctgcaatcttagaaaaaataggtgcttgcgttaaacgtgcttatcaagcaggagtggatgttgttgaagtgcatggtgatcgtttggtaggtgctttatgttcaccaatcttaaatcatcgtgaagatcaatatggtggaagttttgaaaatcgtacacgttttgccttaatggtagtcaaaacaattaaagccaatgcgccagatatatgtattgattataaacttccaattattactgaaaatccattacgtggtaagggtggattaaagattgatgaagctatctcattagcaaaaattcttgaagaagcaggagttgatatgattcatgttggccaagcaaatcatacagggaatatgaatgatacgattccagcaatgggaacacaaccatattgctttatgtcaaagtatacaaaacaaattaaagaagctgtgcatattcctgtttcatcagtaggtcgtattttaactccagaaaatggtgaggcaatgattgaaaatggagtatgtgatatcattggattaggacgttctttattaactgatccagattatgtgcataaacttgaaaaaggtgaagctcatcgtattcgtcattgtatgatgtgtaacaagggatgtacggatgctattcaaaatagaaaattcttaagctgtgttttaaatgcagaaaatggttatgaatatgaaagagtaatcactccagcaataacgaaaaagaaagttgtgattgttggtggcggtccagctggaatggaagcagcacgtgtagctagattaaaaggtcatgatgttgttttatttgaaaaagaaacaactttaggtggtcaattgaatattgcttgtataccacctagaaaatcagaaatgacaagaggtattcattatttgacaaatgaaatgaaagagttgaatgttgatttaagactaggaaaagaagcttgtgcaaattgtattatggaagaaaatcctgatcatgttattattgcagtaggggcttataatattgtgcctccaattgatggtagtaaacagcctcatgtcttagatgcttggaaagtcttgaatcatgaacaattaccaagtggcgaagttgttgttattggtggtggtttagttggtgcggaaacagctgaattattagcagaaatgggatgtcatgtcacaattgttgaaatgttggatgagatagctaaagaagaatcatcaacagttagaccaactatgtttgaaacttttggaaaacatcatgtaacattattaacgcaaacaaaggttacccaaatcaatcctacgcatattaaagcacaaaaagctgatgaagaaataacgatcccatgtgattatgttgttttagcagtaggggcaaaaccacaaacctttgatataacaccacttattgaaaaaggaatagatgttcattttattggtgattgtcatgaaaaagcttcagatatcaatcacgctattgaagaaggctatttaattgctaattcattataatcctcagatacaatataaagacttcaaatacgttgcttttaacaacgtatttttttataataaagatataaaggagggggaatatggaatcgatatatggaacttttatgacatcaggttttgttgtttcattagtcacaattatttcgtggtggattctttttaagaaagctggatataagggatggtatgcgattgttccgatttataatgtttatatcttttgtcaaatggtaacaggaagtggttggctttttctagctatgttgataccatttgtgaatgtctttgttttaatatatttgttatataggctttcacttgtttttggacatggaattttattcacattaggacttgtttttatggagccattgtttattttgattctagcattaggggcttcgtcttatcattcaaatacaacttatttctaaaagaaaaatagaagtgatgattcacttctattttcatataggggattatttatttttccaatcttcgtacatttttaaagcttgatctaaaactttagatccatccatcataccataagtacgcatgtcgatgacttcaacaggaatttcaccttttgtttgctctttgatagagtttaaacggaaacgaacttgtggcccaattaataaaacatcacatggatcagcagcgtattcagttgttaatgcagtttcacttacagcccaaattttagcttccaaacctctttcaccagcagctttttgcattcttgttactagtaaacttgtagacataccagcactacatgctaacatgattttaatcattttatttttcctccttataaatcatattcttgctatatttatattatacacctcaaagatttagaatgaaagaataacatttacaaatttattgacatctcagccttcctcatttaccataagaatatgtaaaaatatttgttgattggtgaggcttattttaatttataaatgtggatattttgtcttataaagttaatatatagaaaggaatttatatgaagaaaaaagatattattgtgattgttgtattattagtggttattggtgtagggtatttggttttttcaatgatgcaagggaaaaaggatgttgttgaagtttattataaagatgaactgatagagaaaattgatatttcagttgataaaacatatacgtttaaaggaagttatggaaagttttctttagaagtgaagaatcatgaatatcatgctgtgaatgttgaatgtccaaatcatgattgtgaaaaaatgggatgggttaaagaaggaagttctaaatctattatttgtgttccaaatgaaatatatgttattcaagcaggaaatgaagatcaggttcaatgaaaaataaatattacttctttatgacctttttactagggttgttgtttgtttttgtaggaatttttgcttttttaaattcagcttattttatgtatatgattgttatggtgttgggtattttgatttttattgatactttatctttattgaagaatttaaaaaccaatatattagggattttgattcatttattgtttgcttgtatatttatctttacaccaaaattacctttatcaattgttgttatggtttttgctttatatgtttcaataatggggatttcgcattttgttacatattgttattatcgtaaagagaaggtaaatgggagattgttgtttttgttatcagcaattgttttgattgtggttggtataagttttattctatctccaagtgttcatgcaaaagagatgacttatatttttattttatatactttgtatttgggtataaagtatatgcttagttcaatgaaagaactgttatcagaaaatcgtaagaattctttaaaacgacgaatacgtgtatcgttaccaatatttatggttgcttttatgcctagggtaatgattgagtatataaatgaaaaattagaagttgaagatgaaataatgaaacaggaggatgatttatcatcagtagaggttttgttcatgtgagtaaagatggttttggggctattggacatgttgatatttgttatcaaaatgaagtgattgcttatggggcttatgatgaagcatcaacacatctttttggagctattggagaaggagttttgtttattgttgataaagaaaaatatgtttctttttgtcataaggatgatatgacaagtcatatttttgcttatacattgactttgaatgaagttcaaaaagaacgcattgaagatacaattgatgaattcaaaaaaggattggtgaaatgggatccaccttgtatcaataaccaagagtcacaagattatgcaagtcgtctttatcaaggaacacatgcgtcattttataagtttaaatcaggaatgtttaaatattattttgtcatgacaacaaattgtgttttgctagctgatcgcattattggaaaatctggaattgatattgtgaatatgaatggaatcattacaccaggaacttatttgagctattttgaagaagaatataaaaaagaaaattcgagagttattgaaaaacatatttattagctataacaggtttgttatagtttttcttttgaataaaaaaattctttgtttcaaataaattcgtttttttcacacatttatttgattgttttctaacattgattttttaaaatgaagatgttaggagggattgaatatgataaaaaatgcaatattaagcataaagaagaatgttggtaaaacaatactattattggtcttgatgtgtgtgattgcaaatcttgttattgcagggttgtcaataaagaatgcaacatcaaaatcaatggagcaggtacgtacatctttaggtagtgatgtaactcttacatacaatatgcaaaacatgatgaagaatcgtgataaaggtgaagcaatggatgaggttattagcccagttacaataaagatggctgatcagctaaaagatttaacatatgttaagagctataattatactgttaatgtaggagtgacaagtgatgatattgatcctgttgaagtgagtaagagtgaggattcatcaaccaatgatgatcgtaagaactttatgggtgatatgcctaagatgatggatcaaaatgattttactgttgttggaaatacaacgatggaaaatatgagtgagtttttaaatgaaaattatattttaaagagtggacgcttacttactcaaaaggatgctgatagtaaaaactgtgttattgaaacaacattagcgagtgataatgatttaaaaattggcgatacttttagtgttacatcaacaaatgcggataatgaggaaataacagttaaactgaagattgttggaatttatacaatgcagacaaatgatcaaataggtggaatgatgagtaatcgtcaaaatccaattaatcaaatttatactggtttaacaattgcacaaaaattaaatgatagtacaacaaatatttctaaagctatttattatttagatgatccagaacatattgaggcatttaaagcaaaagcaaaatcggtaacggatattgactttgagacttatactttagatgctaatgatcaagtttatcaaagaagtattgattcgttagaaaatatggaacagtttgcgactattttcttatgggttgttattggtgcaggaagtgctattttatgtttgattttgattttaacaatgcgtagtcgcttttatgaatttggggtgtttttatcattaggacaatctaaaataaaaatcatgttacagcaattgtttgagatattgatgattgcagttgtatcttttggtatttctttagggacaggaaagatggtatctaatgttgtaagttcaatgttagagtcaactcaaaatagtcaaaaacaagtgatgatggaaatacctaatgaaaaaacaacggaagcatcatctggtaatataaaacaggatttgtttgataaagccatgaatgctcctacaaatagtgagttagatgtttctttaacaccacaaacagttattcaattagctgaaattacaggactgatttgtttggtttctgtcgtcttaccatcaatttatattttacgattatcaccaagagaaattcttgtgaagaaggaggggtaggtatggatgaaaatgtgattttaacgtttgaacatgttgattattattatcaagatggttcaagacaagtcaatattttaaaagatgccaactattcttttgaaaaaggaaagacttacgcaattgttggagcgagtggtagtggtaaaacaacatcacttgttttagctggaggattggataaaccaaaagagggacatattttatataagggtgaagatattgctaaaattggttttacaaaatatcgttgtctggatgtatcgattgtttttcaatcctataatttaattacttatatgaatgctgttcaaaatgttgtgaatgctatggatatcgcacatattaaagtaccacataaaaatcaatatgcactcaatattttaaaagaattagggttaagtgaagaagaatgtaagagagatgttcgtaagttatcaggcggtcaacaacaacgtgttgcgattgctagagcaatggcaaaggatgtagatttgattttgtgtgatgaaccaacaggaaatttagatccagaaacatcacaaggaattattcaaacatttattgatttagcacacctaaagaataaatgtgttattatagtgactcactctaaagagtttgctaattgtatggatattcaattacagattcaccgaggaaaattagaaaaaataaatgaatgttcacaataaattcatatgtcagagttatgatataagtgtcttaagaaagacacataatacaatctataggcgacccctctccctaaatataaatcgtctataataaaaaagaacgtattccccacgttctttttttgtatattaagatttgcttattgcatatttttataggcagatgtataatatatttgaaaaagttgtccgaaaaaaagaaaaatgagaattttttgcgtatatagtagtagggggatattttctccttagaaaggatgacttttatggatagtattgaaacatcggctgcaaaattttcttctgattatttttttcattatcttcttcaccattgtgacgaggtgagaaatctgtttgtttcgcatttgagtgatcaccccatcttgaatacggagcttactgttgcggatttttatcaacgcaaagaaaatgctaaaaagcgtattttggatgttgcggtggttgatgaccagggatattactatgatttagagatgcaaaatggggatattaacagatctgaaatgattagattttttaattatgcatcacttttgttagattcacaaattaataaaggaaaagattataatgtgaaaacagtgaaaacgttgattatttatacgggtaaacctatccgtgatcttgaacattttgaacatcgttttgagttgattgattctgattatttgatcaagctaaaagacggaccgattgaaattgaaatattacaaatagaaagaatggaggaattaggaatggaagttgtaaataacgatcaattttatcgtattgtacatatgttttcgaagaatgaagattttattgatcatcatgatgatgaattgtatacattagtgcttgatcactataataagtatcttaattcagatgaatatattgcgaatctacaaatagaaagagatcgtcgtgcatatcatactggaatgatacaaagtagaaaagaaggagttgaggaaggaaagataattggaaaaaaggaaggtatgttagaagcaaaaagggattatatcttaatactttttagaaaagaatttccttatgaagatactcgctttcttgaaaatttatctattgaacagtatgatgcgattatgaagttattgagtgaaaatgggaatctagaacagatttatgaagtatgtcatatcttcttataattgagtgtttgagcatagtatataaacttaaagggtattgattaaaatccaaaaagtaaagaaaacggaggaaatgaacaatgggacaaaatgataatcagttttatcagatggaatcaaaggatgacaattttgttgatgatgatattgcaatccatttgttggtgagagaatattacaaggagcatcttgatactggtgaatatattgcttatttacaaagggaaagagattgccgagcatatcatactggaatgatacaaagtagaaaagaaggagttgaggaaggaaaaatacttggaaaacaagagggaatcgaagaagggataaggattggaaaagaagaagggtatgaagaagggataaggcttgggagagaagaaggaagaaaaattgtaaaacagaaggagattgaagaaggaatattagaagttaaaagagattgtgtcttaatgatttttaaaaaagaatttccttatgaagatacacattttcttgaaaatttatctattgaacagtatgatgcaattatgaagttattgagtgaaaatggaagtcttgaacaaatccatgaagttttaaaaaaatagggtcaacttttcgttgaccctataattatataatttgaaaatgttttaacgcattataaataccattatcttgaatgtcagttgtaatataagtgacttcatcaaataaaagtggattactattccccatagcaacagcttctttggtgaatttaagcattggtaagtcatttgtagaatctccaatacttattgtatcatcaatagatatatgtaaataatcagctataaattgtataccagttgctttagaataaggtaatggaacaatttctaagaaatcaacatctctttgaataatatcaaaatcatcagccaataaagctctaaacgcttcaatatcagattcctttgtataccaagaagcaaacttatcaaaaggaacaacatcattttgattatatttatgaacaggaaatttttccttaatatatctttgttcaactccttgaacaaaaggatgatatgaaacttctgggaagtaaacaccataacgtccttctaaaactgtatcaacatgatattcatgtgttttttgaatgattttctgttttaattcatcagaaatatctacatgaaaaataggttcgccatgatattcaatatatgttccacatccacatatatatccatcaaaaggaatatcagtaatcacttgatcaattgtagaaattggtctcccagtattaataaaacatttatgtccgttttgttgggcaagttgtattgcttttttagttgaatcaggaacagtaaaagtttgttcatctagtaatgttccatcaatatcaaaaaatattaatttagtatccataatttcctccgtttcattaatatcatagctataattaaaaaataggtcaagatataaagaggaaataatcaagttgtatgtcaagcaaatttgaaaatgtctcaaaaatcgttaaacattagcaccaaaatttcggtgcttttgttttgcgagataatttagataagaagcttgtttccatggatggctcattggtggaatatatttcttctttggcttcttttcaatgacttttttatcaaattctatagaatatagttcgtgttcgggcacttctttcatgatatgaatctgatcaagtacattgacatatagatttccatcaaacgcttcaatgaccatacaatccatcttgttttttagatatgtaggtattcctttttcggttacaggaatatatatcttattcttgaatttgatactatgtcctgaatctatctttcttggagaaagaacagctaaagtacaattgattttttcaagtgatggttgcgtttcaaataccgatttggtagtattgaggtgtagagcaaattggtcattgaatttttttaggtaggattttaaaaattcatttgccgactctatatctgttatgtgagcgcgtctgaggtcaacaggcaatcgtgactgaaatgtttggttcattctttcgattcttcctttggcttgggcgacgctcgttgtttttatatcaacgccaagattgtgacacgcataggaaaactgtgtgaaagtatcctcgtcatcgaaagcgttgttttttcttttatattcaaatacagtacgtctgtcggtataaaacatagcaggaatgccataattggtaagaatctgataaaaaacgttgtagtagccttttaaagtttcctgattatcgaaataagcaccaacaacttcaccagttgcatcatcaactgctaaatgaagatgccatactttatttttgagccattcataacttgatgcatccatctggatcatttcccccatatacttgcatcttggtcttcttgggtgagcatccttttcatcaacaatagcaattgcttcctttataacattttggattttctttgaacttgtattttcgagttttgttttcaaagtttcctttaatatttttctggtcttttttctggcttttggagaaatgatattttcttctctaagccatttattaagtgttgtatcactaatttttatattcagatcttcttcaatgatttcacagaaatgagtaaaattagcatcgctatattcctcaatataaagcttgatgatcttattcttaacatcaagaggaattgcagtagaaggaattttacttctattgccgtgaacaaaaccagccttaccttcattcttatatttcaaaataagtctattgacagttcttacagtacaattcaatttaatagctgcacgtttcttgttaccatcagtttcaactaattttttaataatcaaatatttattttcttcattcattcttaattcaacctttctcattgcataacctccagataaaaatgaggttatatcataacatgaagttttgaatatgtcctgcatgcaggacatattcaactttgatacattgagacaatatcatatttgaatcagagatataaagaggaaataatcaagttgtattgcgaaaaattttgcactgtgatataatttctattaaatttaaagaggggatgatgcggatgtataaaatattacgtaaagaaaaactaaatgatgttgttgaattaatggaaatccatgcgccaaacgtttctagaaaatgtgagccaggacaatttatcattttaagagtcggtgaagatggagaaagaattcctttaacaatcgctgattttgatagggaaaaagaaactattacaattatttatcaaattgttggatattctactgaacagttagcaaaattaaatcagggggatgagttaactgattttgtaggacctttaggtgaaccaactcaacttcatcaatcaaaacatgttgttggggttgctgggggagtaggaagtgcacctttatttcctcaattacgtgctttagccaatatgggtgtagaatgtgatgtcattattggtggtagagaagctcaatatgtcttattagcagaagaatttaaaaagttctgtaagaatgtatatattacaactgatgatggatcacttggacaaaaaggatttgttactcaagtattagctgatctaattgaaaaaggtgaaacaattgatgaagttattgcgattggacctgtaccaatgatgaaagctgttgttggtgtaacaaaacctcataacattaaaacttctgtttcattaaatccaattatgattgatggaacaggtatgtgtggatgctgtcgtgttagcgttgatggaaaaattaaatttgcttgtgtagatggtcctgattttgatggattattggttgattttgatgaattaatcgcaagacaaaagatgtttaagagtgaagaagcacatatctgtaatttaacgggggtgaaaagataatgccaaatatgtcattagaaaaggtaaaaatgcctgaacaagatccaaatgtaagaaataaaaactttgaagaagtttctttagggtatacaaaagaacaagcaatggaagaagcaacacgttgtttaaattgtaaacatcaaccatgtaaaaaaggatgccctgtaggggtacctattcctgaatttattgccgaagttgctaaagggaactttgaagaagcttatgaaattataacaagagaaaatgccttaccagcaatttgtggacgtgtttgtccgcaagaaaatcaatgtgaaggaaaatgtgtccgtggaattaaaggtgaatcagtaggaattggtagattagaaagatttgttgctgattatcatagagaacatggacaaaagaaagctttaaatattgaaaagaatggtaagaaagttgcaattgttggaagtgggccagcaggtattacttgtgcaggtgaacttgctaaaaaaggttatgatgtaactgtatttgaagctttgcataaaactgggggagttttatcttatggtattcctgaattccgtttacctaaagctttggttcaaagtgaagttgatggtgttgctcaattaggtgttgattttgaaacaaatgttgtagttggaagatcaattacaattgatgaattacaagaacaaggatatgaagcaatatttgttggaagtggagcaggacttccacgtttccaaggaattccaggtgaaaacttaaatggtgtttatgcagctaatgaattcttaacacgtgttaacttgatgaaaggatatgaatttcctaaacatcctacaccagtaaaaattactgatacagtatgtgttattggagcaggaaatgtagcaatggatgctgcaagaacagcaaaacgtttaggagctaaggatgtttatattgtttatcgtagaggagcagaggaagtgccagcccgtgcagaagaagttcatcatgctaaagaagaaggtatcatctttaagttattaacaaatccagttaaaatcaatggtgaagatggatgggttaaatctatggaatgtgttgaaatggaacttggtgaacctgatgaaagtggaagaaggagaccagttgttaaagaaggatctaattttacaattgaaacaggaacagttattgtttcaattggacaaagtcctaacccattgattagacaaacaacaccaggacttgatactcaaaaatggggtggaatcattgttgatgaagatacaatgaaaacaagtaaagatggtgtttatgctggtggtgatgttgttactggtgcagcaactgttattctagcaatgggtgctggtaaaaaagctgctcaagctattgatgaagcactaaaaaatagataatttatttgaggagatgttatctcctcttttttgtaaatgatataaaaacttttagacatgtatatattaaagagcttttaaaatatactttgtctttattaagataaaagaataccgttactttttaaatttttgatgatataatatgactagaatgtaggtgattggctatgattgagaaaagtgaaaataaagcttatgataaatatcaaaagttaaatcaatattggcttatctctcattgtaaattgttgtacataggatgcttaattggggcaattatcgaattagttatcatgatggtcactttttatatcaatgaattatcatctgaattttcgttttatcttttaaaatatcttttatttccaatttcatttagtatgattataagtattcttggttcgtgtgttgccaggagtcaacatttatcatttaaacagaaacaatattttctttccatattaactgttggcttgacttttgttttttctcttgttcataatcaatttgttgttattttattgattcagggattaccaatacttgtaacagttatttatgaagatgaaaaattagcaacaattattacaatattaagtttaatacttgtttatataagtggttgttttgttcaatttgatccagataagcaacttgataatatgtatattttaaatatgcttgttttaatggttattatttttatgctttgggtaataagttgtacaatgataaaatttaatgagaaaaaaagaaaaattgttattcaagatgatattgaaagatttgatttacaagaaagaatatatattgatggattaacattaattagaaataagagtgcatttgataaagagttagaaatgatcatagatgataatgtttcatcatattatcttgttatgtttgatattgatttatttaaacagtttaatgattcatatggtcacttgtttggtgatagagtattaagctatgttggtgaggtattattaacagaattaacaggcttagaatcatatcgatatgggggagatgaattttgtctcatattaaaaaataaaacagagtcagaagttctagaaacaatgcgaaaaatacaaaaaagattgaaacgaaagaaaattatgaatcaagatacttatataactataagtattggaatagctaagaaaaccaaggaaataagtaaagaagaatggattattagggctgataatgctttatatgaatcaaaaaataatggtagaaatcaaataacttttgcaaaagaatcttaaaaaaggattcttttttttaaatcatgaaataaaaatattttataaaaatatagctatgtgactcttgtgtgacgagcaatatttatactaaagttagaattaatgacattaggtacattgataggacattaaatagataggagtctgataaatatgatgaaaaaagatagagttataaagtttgggatcgccgttgtccttgtatcagcaatggtagtaggtggttcaattgcatattttagagctgaaactgcttcgaaaaatacaatgagttctacaaatttgaaaattgcattattggaaaaagggaagccagaagcaaaaaaagtaaaggataacgaagtccttgtagaaaatgttgttcctggaacaacaattcaaaaagagctatttgttagaaatataaaagagagtccttcatatatcagagtaacgcttactaaatattgggcagattcaagcggaaataaattaccagaattagaagctaaatatattgagttaataacgcatgataaatctcaatggattgttcaagatgatgatgaaaataacgaagttgtttatatgtattacaaatttccattaaaaacaaatgaagaaacaaaagatttcttagatcaattgaagatttctagtgatggaagtcaattagataattcatatgcaaacttaagagcaaaagttgatgttgaagttgatgcaattcaagaatatgcagctcaacaagctatcttatctgagtggggattagaagtaacgattaataatcaaggaattattcaacaagtagaagaataggaggaataaagttatgatgaagaaattaagtgttttatttgtaatgatagcattacttgttccgactattggaaaagttcatgcacaagatgattcaattattagttttgaaggtgaagccgaaaaatttatttatagaaataatgatggagaagtatttggtggatttaaaaatctatatccaggtgaagaaagaactgaaacattaacattagttaataatgattatagagaattaagattttatatgagtacacatatcttaaaacaatttggaacagatatttcaaatggaattgcatatgatgtcaaaattaaaatcaatggtgaagaattatttggtggtaaagttggtggagaaaacaacgttgctattagtgatcaagaaagtgaaaatgctttaattgctacacttaaaaaaggtgaaagagcagttatggaaatgactttaaaaactgatggtgatagtatggataatgcttaccaaggagcaacaggtactgtacaatacaaatttagtgttgaagcagatgatgaaaaagctccagttgtaaatacagttgtcaacaaagttgttaatacaatcattaatccaattaaaaagatagttaagactgaagatacaacttcattaacattcttaggaattttattagcagcaagtgttattggaatcggatatgttattgtgactaagaaaaagaaagaggagaaggaaaatgaagaaaaatagagcatacaaaacaattgcaaaattagtattatctattgcttgtgttttcgcctttgcgttacctcaaatgactcagtcacaagcaaaagatgtttattatgaaattacatttagagccggagcacatgcttcaatcaatggaaaaagtaaagttgtcaaaaaagtgaaatatggtagtcaattcccagacgttcctgatttaacaattgaagaaggatatgtatttaaagaatggagtccagtattacctaaagtaggaagtaaagtagaaggaaaacaaacatttgtagctaaatgtgtaccagttgtatctgggcaaacatatacagtaagatacgttgatcaaaatgatgttgatattatctcacctaagattcgtattggtgaattaggttcaactgttaatgaaagagcaaaaacaattaataattggccagtagatcaaagtgagaaatcaataaagattactgataaaacaaatgaaattaaatttgtatatacagttccagctgatgaagtcagaactgaatatgttacagagtatgaaacaaatgttgtagatcaagttacaactgttcaacaaaatgctggtggtgctaatggtggagctggtggacaaggaacaaatcctggaaaccaagatgctaataatcaaaacaatcaaacaacagttgatgaaaacgacacaccacaagctggtggagatacaacaacagtagatgatgaaaaaacaccaaagcaaaaaggtcaaacttcaagtaatgctgcttttgttacaggtggagttggattagttattatccttggattagttgcttacttagtagcaaaaagaaagaaaggtgctgaataagactttggttaatccaaagtctttcttctctgtatattaaaaaaacagagagttttttatctatgtgacgcttatgtgacttcaaaatcatataataaaaacagataaaatagagatagattatatatatatgaaaaatatattgataggaggataactatgaaaacaggaaagttaaaaaagatattagctagtgtattaacaataacaatggcttttactcttatagcattcaattcacatataaatgctgaagataaagataatggtttaaaattagacaaaactgcaaagttaaatgctgatgggacagctactattactttagaagcttatgctactggtaaagttacaacgactagcataaaaaagccaacagattatgttttagttattgatcaaagtggtagtattgcaaaaaataatcagcttcaaacgttaaagaatgctgttacaaaatttgtaacactagttgctaatgataaagatgataaaggtaataaaatggatcatagggtttcaatgactgggtttgcctgtgatgagaatggtggattaacaaacgatagagattttaacacatatccattaagtggtggaaataataatggacactatcgtaatactggactttatataaacggtatattaaaaaattatgtcaaacatagtgaaatttatttatctcaaatggataaacaaagtcaggattattatatcttagataatggtagagaaagggaagttaaattttctaataataattggcaatattatacttggagaggttgggaaaatttcagtcctaaaatcaattcttcaagtaatgatagatatagacaagtttataaaaaagaaccattgactagtgaggattataaggtatcgttaatacctgcaaatatatcaggaaatttaaatccttctatttcaacagcaataaaaaatttaggatcaaatggtggtacgtatgcatattatggaatgaatatggcaaataatgtttttaaaagcaatcctataaattctgatgaaagaaacagagtggttgtattttttactgatggtaattcagaaaataaaaatgatgtagttgctgaaggtaatgtttccaagacatcatatggatcagatgtttatgttattggtttgaataatacaagtacagattcatttttgaatagactatcttcgaactatgaaagtgcaactactacaagtaatggatataaagttagtgataaatattattatccaactagttcaagtgctgatttagataaaatatttgaagctatttacgagcaatctcaaggttcttctactaccttagatagtaatgcagttatttcagattatattacacatacttttaagaatccaacatatgaacaagtgaaggtttatacaagtaattacttaggagataatcgttggtcaaataaagctaaatttgataatgctaatattagtatatctgataatagagtaaatgttcagggatttgattatagtagtaattatgttatggataaggatatttcaggaaaaccaacaggaaagaaattaattattgaaattactgttactcctattgatggttttattggtggtaatggagttcttactaatgatgaagctatcataatggacaaaattaatggaaataaagtagataccttcccacaacctacagtagatattccacttcaatatgattttgacaattatgatgcaactatttatattggagatgattggaaagagttagtagagtttgttgatgattcaacaaaaagtggaatacaatacaaaattaatggtaaagaatatacaatagatggtattaataatgagtatgctgacatagaatatgtaattaaagatggtgatgttattgtaggaaactacaaagttaatggtggcgaaaaaacatggagagatattaaaacggaaatagattcaactaaactaactgattgccataattatactattaatctcaaagtaactccaagaatacagaaaaaagatggagtagcagacttagaagttaataaaaaatattctactttgcatattttaaaaccttctattaatttgactgatgaaactattttcttaggagacaacactgatttaacaaacagagtttcagttaatgataaatggaattgcaatcatcccgaacgtccagaaccaagtacaaaaacacctactttaaattatacatttgatcctgaacaaaaagatcaaggtactttaaatggtagtgtatatactccaaatattaagaaagatactgattttagtctaagtgtttataatggtaaaacaaatattactcaatatacaaaattccataacgatacacaaaacatagatgaaaatacatttaaaattaaagtagttgctggaagaatcgtattatcaaagaaattaatgaatattaacgatatagatttatctgatggtgatccgatatttgcatttgaaattaaagcgacagatggattgtataacggacaaactttctatagatatgtaagaatgactacggatggcagcttagttgagaaaaaagttatgcctgctatagaagatttaccaaaaggaacatatgaaattacagaattatcaacattacgttatagttttgtgaattctcaagtaaatacttcatcttcaacaacaaatagaactgtacaggttacaattaatggtgttgaaagtgctgagcaaaaagtttcatacacaaataaagtaaaatctaaagattatgattctgataatgatgttttaattaataaatttgttaaagataaagatggtaaagttactattgttcaagagaaattatctaaatagaaaggagaaatgatatatgttaaataaaatgagaactcataaaaaaacagttgtgatagcatttcttcttctatgcttatcatttggtgtaacatttgcattattaaagaatcaatcaaattcattaacaaatacttttgtaccaggaagtgttgaaacagaaattgttgaacctgatccaaaaccttctggaaatgatatagaaaaagaaccagcaattaaaaatactgggaaaagtgatgcgttagttagagctaaagttacattatcaccttctgagctagttgaaaagttaaaaattgaattagcttattctaaagattggactttagctgacgatggttattattactatagcaaaattttacatcctaatgaaacaactactccattatttactaaggttacaggtaatggcattgtagagggtgatcaattttctgataaaatcgctggtttagaaattgctatttatcatgaatctgtacaaaatttagttagagatgatgaagataaggcaattattgcagaagcaggatatgatgaaaatgctcaaaaaatttggtcaatctttgactcattaaataaataatgttatgatagataggagaggaatctcctatcttttttatagaagggaatgtatgaaaatggtgagtaaaatttgtgatattttaacttatattattttgacaatattaattgttatagctggaatgttatttatacctagatttgttggttatgaaacatttgcggttattagtggtagtatggaaccaaatatgccagttggtgcaatcgtatatgctaaagaagcagattttaatgatataaaagttggcgatgctattacttttcatgcaaatgaaaagacaattgtaacacatagagttattgaagttgataaagataataaacaatttacaacaaaaggtgatgctaataatgttcaagatgctgatccagttaaatatggaaatgttattggaaaggttggtttaacaattcctttattaggttatttaagtatgtatattaagactcctttaggaattgcaggaatttgtgcaattatatttgtgttattatttttaaattttttacctagtattcttgaaaaagatgaggaaaaagaaaaagttgaataaaaaatgcttagaactcaatataatgagttcttttttctttaaaaaacttttaaaaacattaaaagaaattgtatttgtgactagtatgtgactttcaggaattataatatagtcagaaaataagaaagagattaataaatcaaaggagagattaatatgaaaaacaaaaactatgatcgcatgtttagctttagtaggtgttattggattaggttctacattagcttacttatctgacaaatcaaatacactaagtaatacatttgttgtaggtagtggatatattcctgatcctgacttgaatcaagcagtatggattgatgaaacaaaagttggtgaaaaaagagataatgaaaaattatatgaagatcgtactttaagtggaaatgactatgtaaatgttttagctggtggatcattaacaaaagacccagtattaagagtaaataaaggatcagtaaagagttatgtttatttaaaagttgaaggattagatgaattagattctaaaggtattacaacaacaattaatactactgattgggaaaaagtaatggatgatggtcatacacctgatctttcaaaaaatttagatggaatttatcgttttaaagaaacattagatcctacaaataatgttgcagcaacttctgctttattcaatacattaacagttagtgttgattttgatggtgaaaatgttgatttaaataatgttgaattagctggttgtgctgtacaagcggtgacttatgtagatggtaatgaaacaccaattaacttagtagatgctgatgctccacaatttaattaaagatattaagttattgtaattattaaaaaaacaaagtaaaataaaagagataagaaattatctcttttatttttgggaggaaaagatatgaaattgtctaaattatgtaatgttttagcttctgtagttattgctttggttattttgatttgtgctccattagtagtaccaaagttttttggatatgaattgtttggtatattgagtggaagtatggagcctacatatccagttggtagtgttatttatgttgaacatgtaagtgctgataagattgaggttggtgatcctatcacttttaagatggctgctgatagtgatgtagtcgcaacccatagagttattgctaaggatgatgaaaaaagagtttttaaaactaaaggggataataatgatcaggcagattctagtccggtatcttatgatcgtttgattggtaagagtgtgttctgtattccttatttaggttatatttctagctatgttcaatcttctgctggtattgttgcaattgtagcagcaatggctttggttttggctttgtggtttttatcagattatttaaaaaaaagtgaaaaacaatgaagtgtgtgacatctgtgtgactatataaatgtaaaatatacttgtaaaataaaaatcatatagatggaggaaacaatatgaataaaaagagattaagtggtggtattgtagctttagggttagctgcattagttgctgttggtggatcattagcttggtttactgataatgaaagtaaaacaaatcaatttacaactggtaaagtagatattactttaactgaagaatctaaaacaggtacaagtacagatgatggtattaattatactaatgtaatgcctggtgatactttagataaaaaagtaattatccataatgttgaacaagcagcatgggtaagattaaaagtaacagttaatggcttatctcaagcagatgctaacaaattagtatttattgataatgaaggtaaagaattcaaattagaatttgatgcaaataatactgcatatattactagagatgctgctatggctgctaatgatgcaaatggtgaatatgttccatttacagcagtaaaagttcctggtaaagattggaataatgattatgctagtaaggaattctcaattgaagttcaagctcaagcagttcaatctgataacaatcctgatggattcactggaatgactgatgcagatatcattgttgcagaataatcaattgataaagaacatatagaataaaaattctatatgtttttttacttttgtataaatatttatgtgaatgctaaaatttatatgcaaaatttcctaaattcactttttacaataacgtttgtaccagatagggtgatatgatataataattttgtgaattatcaaacgaatttatataaaaagatgcttgtatttataataaaaaagaatacaatagtagtgccttatttatttttgtgaaagagggataatgtatggaagataacacgatttacgtgacaatgtttaagatgtttacagttcgttttggggatattatgattaatggtgatgatatgaagtcagataggctattaagactttttgcttatttgttatataatcatgaaagaattattccttctagtgaattggttgatatgttgtggtgttttgaagaagttgataatccaattggggctttaaagaatttggtttatcgtttaagagttttattgaaaaagacttttagtattagtgatttaattacgactggtaagggatcatattctattaataaagattatcatattgaggttgatgctttaaattttgaaaaagagtgtcaaaaggaaatgaatacgattgatgaatatgaagaatttagttgtttatatacaggtaaatatttagttgaggttgaagatgatcataatgtgattacgaaacgtacttattatgattctgtttatattgaacgtattatggagtatgcaaatttacttgaagaacaaggtgagtatgcaaagatggaacatgttgtgaaacgtgctcttgaaattaatcagttagaagaagaattgtatgaattgttgattagatcgttatattatcaaaaacagtataagcaggcagctgaaatgtatcgtaaaactacagagttgctttataagtctttgggagttaaaccttctgaaagtatgcagaatttatttgagatgattaaaaagcaaagtcatagtgaggatgcagatattattgagattcaaaaggatttggctgctgaaactcctgagggggcgtttttatgcgaatatggaacgtttagagaaatctataatatgcattcacgtttgatgggaagacttggtatatgcgctcatatgtgtcttgtgagtgttgtgaatagaaaacctagagatagtgaagatgatcagaaatatgttgagaagatcatggaaaaaatgtaatctgcgatgttgagtggtttacgtattggtgatgttctatcacgtttgagtgtgaatcaatttattgttttacttcctagctgtaattatgaaaattcgagtatggttatgaatagggttttaagaaaaattagatattctttaaatcatacccgctttgatttagaagtgaccattgaagaagttgaaactaaggggtaaactatggataagtatataagaagtatgtcatttaatatgattcatttatgtattgatgattatgaaaattataaaatcaaaggcagagcctataacaatactcgtcaagaagttatatgctttaatgatattgatgatatctttatccagtttgatcgtatttttgatgataatggtcaaccccaagcatctcaatcatcaagaagttttactcatccaaaaccacttggaagatatcagtttagacccgagacttataatgattatgatgaatttttaaatgaggttgggaaaaaggctactttagatttggttattaaatcaagaaaaagatcaacatggcaaggaattattatttataatggtcaagaaattgcatttgatagcattttagaaatgttgaattatgtcatttctttcattgagagttaattgttataaaaaaatatataaatgtgactgttgtgtgacattaatcatgtattatatggctggtaggtggttatagatgaaacagatgagtcataaaaacaacaatttcataattaacattaaagaaacacaaaatgatacttggcaaggaagtatacagtggattgaaggtaaaaaagaagaaaactttagaagtgccttagaaatgattaaactcattgactctgctttaaatgaccaagacccatatcataaagaataaaaaaacaatgattgtatagtaacattcattgtttttttattgtctaatttatttactaaatatttattaatatattagtaaataaattaaatatatttagtaaaaaatatttgacaatcaatcgcattgtgatagaataaagatagaaaagataggaggaaaattatgaatcatgaaattaatagacttattcattttgggtttaatcataaaatgttaaaagttgaagatgaagattatgcagtgaatttattattggatttgtttcatttgaatacgtttgaaaaagaagatattgaggaagatttaaaagagtgtacacctattctagataatatgctagattatgcagttaaagaaaatcttattgaagataacataacagctaaagacctttttgatacacgtattatgaattgtttaatgcctcgtcctagtgaagttgttgaaacatttaatgatttatatcaaaaggattgtcaaaaggctacagattacttctatgatctttctatagcatctaattatattcgtaaaagtagaactgataaaaatattcgttttaaaaaatattatcaatatggagaaatagaaatcacaattaatctttctaaaccagaaaaagatccaaaagaaattgctaaagcaaaattaatcaaatcaagtggctatccaaaatgtttactatgtaaagaaaacgttggatttagtggggatttaaatcgtgcagcaagacaaacccatcgtattattccacttgatttagatgaacaacgttattatttacaatattctccttatgtttattataatgaacattgtattgtctttaatgaagaacatcgtccaatggttattaatcatgatacctttactcatttactttcttttttggatatgttcccacattatatgttaggttctaatgctgatttaccaattgttggtggttctatcttaactcatgatcatttccaaggggggcgttatactttcccaattgaaggagctaaaatattaaaaacaatctatttaaataaatatccagacttaaaaatagaagttatcaaatggcctttatcaacaattagagttacttcttcaaataaagcagaaattattcaatttgctgatgatttattagcaaaatggaaaaattattcagataaagcattaaatatcctatcacatacagatgatatcccacataatacaataactccaattgctagaatgaaaaataacgaatatcaaatggatcttgttttaagaaacaatcgtacaagtgaagaatatccagatggtatcttccatccacatcaaaatttacatcatatcaaaaaagaaaatattggtttaattgaagttatgggattagctgttttaccagctcgtttaaaagatgaattatctttattacgtgattgtttaattcaagaaaagaaaattgaagattatgatgttttattgaaacatcaattatggtatgaagaattaaaagcagaaaatgaaattacaaatgaaaatgttgatgatatcttatcattagcactaacaaagaaatttgttaatgtactagaggatgcaggagtctttaagatgaatgatgagggtattgatagttttattcattttgttgaatctatggaggaataagggatgattaaagttattgaaagagttgatgatcatattgatttaatttcaatgaaaaatgatcaattagaaattgttgtttctaattttggttgtacaattatcaaagtattaatgaaagataaagatggaaatgttgatgatgttgttttgggatatgataattttaaacaatatcaaacattggatgcttatttaggtgccttagttggaagaattgctaatcgtataggtaaaggtgaatttactttaaatggggttgactatcatttagctattaataatggacctaatcatttacatggtggaataaaaggctttagttatcaaatctttgattatgaaatcaaagatgaaaagacaatagaatttcattatctatctaaagatggtgaagaaggctacccaggtaacttggattttaaagctatctatcagttagatggtgatactttaaaagtaagatatctcgcaacttgtgatcaagatactattattaatattactaaccattcttactttaatttatcaggtaaaaaagaaaatatttataatcatcttttaactgtaaaagctgattgttttgcttgtattgaccaagatggtttaccaactggagtgatgcgtgaagtcaaagatacaccatttgattttaatgaagcaggatatattggaaatcatattgttcaagaagatgaacaattaactctaggaaaaggttttgatcatccatttatttttactgcaaaagaagatcaagtgattttacaacatccagcaactggaagatgtttaactgtttcaacaacattaccaggagctcaaatatatacagcaaactatttagatggacgtttaggtaaatatggacaacattattatgaaagagatgctgtgtgtatagaaacacaaaatttacctgatgcgattcatattgaaaaaaatccatcaacaattttaaggaaaggtgaaacatatgatgagatgacatcatatcgatttgaggtaaagaaataatgaaaaaagcaagtttagttattaaagaaattcaagacaatcaatataatgcacttttaaaagaagtctatgttgatgaaagtttagtagaaaatcaaaaacaaagatatatcaaagcgattgaaaagttcatatctttatatggtgatcaagatattgaaatctatagtacgccaggaagaagtgaagtttgtggaaatcatacagatcatcaacatggtgaagttttagcagccgcaattaatctagatataattgggattgttgctaaggatgataaagcagtaaaaatcttatcagatgattatgatattcaagcaattgaaataaatgatttaacaaaaagagatgaagaaattgaaacatcagaaggtctaataagaggtgttttagcaagataccaagaattaggatttaagattggtggttttaatgcttatatgacaagtgaagttttacaaggctctggtttatcttcatcagcggcttttgaagtcatggtaggaactgttttatctggtttatataatgaaatgtctattgatccagtgacaattgctcaagttggacaatatagtgaaaatgtttattttggtaaaccttgtggattaatggatcaatgtgcttgttcagttggaagtttaattcatattgattttaaagataatgatcatccagtagttaataagattgatgttgatttccctgaatttaaacatagtttatgtattgttgatgtgcatgcatcacatgctgatttaactaatgattatgcatccattccttatgaaatgaaacaagttgcaaaattctttggtaaagaatttttaagagatgtcagtgaacaagatttctatgctcaattaccagaagtcagaaaagcaacaaatgatcgtgctgttttaagaacaattcatctttttgaagaaaataaaagagttgaaaaagctgttagtgctttaaataatggtgattttgatgcatttaagaaagttataaaagcatcaggagaaagttcatttaaatatttacaaaacatctattcaaataattatactgatcaacaagcagtttctattgctttggctctatcagaagaaatcttaggctcacaaggagtatgtagagttcatggtggaggatttgctggaacgattcaggcttttgtgaaggatgaatttgtagaaaaatataaagctgaaattgaaaaatattttggcattggttcttgtcatattctaaaagtgagaaagtatggcggaatgaaggttttatagaactcctaagggagttcttttttaattatttaggaaaagtaggacaattgatttgaactatgttatgataatgttgtgataacagtttattgggataaagagggtgaaaacattgaaatggaatattgtagcagaatatatttcattagttattttggcaattatttgggtctatgcaagaaagggaagtcatttaccaactttgaaaaacagaacctttcaaggatgtctggtgatgagtttttgtgcaattctttcaaatattttatcaacaacaatgatttatcattatcaacaaattccatgttttttaacatggattgtgacaagtatttattttatattaactccattaatgggattgtcgtattttttatatactgtttcagtcatttatcatgataataaggaattaagaaaagtgatgattatagcttttgttccagcagttttttatgtcatcttagttatgattaatccttggaatcattatttatttagtataacttcattaggatatacgcgaggaataggaatttctagcacatatattattttttatgcttattgcatagcaagtattattgtgaccttaaaaaatatgaaacatatggataaaacaattcatcgtattctttccactttccctattttagcagttgttgttattattattcaacaaatctatccaaatgttattttatcaggttctgcagcaacttgtgccttattaattatatatttacatttacaaaacaaacaaatttctttagactatctaacctccttacccaatcgtcaagaattattaagtatgttagatattatgttacgtcgaaatccagaacaaaattttgttttaatggttatttctttacgtaatttccgacaaatcaataatacttatggacaacctataggagatgcatttttaaaagaagtgagtagttttttaaatcatattggtcctaaacaaaatgtatatcgttttaatggtgatgaatttgcgttattgtttacacatgttaatgaagctgaaatgaaaaaatgtgtagaagtcattcaaaaacgaatgaaacattcttggaaagtcaatgattatcgtatttatttatcgcatgtgattggagccgttcgtcatttggatcatttacaaacaattgaacaaatcattaatgcgattgaatatgcaataaatcgtgcaaaagtaaaccaagaggaagaaatctgttattgtgatcaaaagatgttaggacaattagaaagaaagaatcagattattcaaatacttaaagaaaaattagaagatgaaagttttgaaatgtattatcaacctatttatgatttaaagacacaacaatttattcatttagaatctttgatgcgtttaaaccatacaccacttggaagcttgtcaccagctgaatttattccaattgccgaagaaacaggtttgattattgaaatcacatatgtcattataaaaaaagtatgtcaatttataaatgatctacaaaaattaggtatagaacataaactgattcatattaacttttctgctattcaattctcacaacctgatttaagtgaaaaagtcttgcagattattaatcaatatcatattcctttatcttcaattgaaatagaatttacagaaagcacactagcaaaaagcagtcaagttgttaatgaatttgctttagaaatgatgaaacatggcatttatttaggattagatgattttggtacaggttattctaatttaacgacagtgattaatattccttttaagactgttaaattggataagagtcttgtttatgccgcaatggaaagtcatcaatcatcacttgcaattcaacatatttcatcggcttttcaggaattaggaatgaatattattgctgaagggattgaaacagttgaacaaaaggatatgatggaaaagtttcaaattaatcaaattcaaggttattattatgccaaacctatgagtgataaagatgtagaaaaatttttgttgtcatatcaaaagaataatcccatttaaggactatacttttttaaaaaaatttagtacaatacttttataggaggggatattatgtattgtcatcaatgtggaaaagaaattaatgatgaggtgaagttttgtccgtattgtggagcacctatagatttaggacaaacacaaacacaaaccgaccaaggctatcaaccacttcaagataatccttataatcaaccatacaatcaaaattataacaattctaatgttaaagccgatgatgcacctagtgctggttttgctgttttatcattctttattccaatcgttggattaattttatatattgtatggaaaaatgaatatccagctaaagctaaatcttgtttaaaaggtttaattgttggggttgttttgtatgttatatcactttgctgtatgtttgcagcaattggtagtatagccactgattctgaagaagatcttgagtttaatggttattataatgcggttgtagaaacaataccttatgaatcaattgattaagtttattattgaacgattgagtcattttggagaaataccactatgtaatgggattgcttcaagagcactacatattggtggattttgttttccattatgttatcgttgtacttttattttgatattctttgcaatttgtatggtgattttttatcgtcgacaagttcgcatgccttatatgttgattgttatatgtatgattcctatgattgttgatgggagtctacaaacattttttgctgtgataagtactaatttgaaaagagcaatcactggaggactttttgggattggtttagctgcttggatgactcgtttatttttatatttggatgaagatataacatctaaaatgaggtcgaagaaaagtggatagaccttttctttttagctgggaatatcttatgatagtaaaaaattatcagttattatcatgataaaaaagactaggacttttataaaatatagtgtataatgtcattcggaggcgaaagacatgtataagcaattagagccatatggaaaattggttgattttttaggtgaagctttaggtgataatgttgaaattgccttgcatgatttaacttctcaagaacaagagattgtagctattgctaatagccatatttctggtagagaagtaggggcaaagctttctaatttatcaatccattatttagaaaccaaacaatataaagatcatgattatgtaatgaactataaaacaaccggcccagatgggaagttattacgttcagcaacttattttatcaaagaagatggtagagaattaccaattggaatgttatgtgttaatgttaatatttctgattatgaatatttagagacaacgcttaagaaaatattagggattaaagaaagtaaagatgttgaatttaaattagataatccaattgagattttatcttcaccattggatgaaatgattgatttatatattaaggaatgtttagaacaaatgggatttcctagctatttcttagtagaaagattgaatgttgaagaaaaaataaaggttgttaagtatttacaggaaaaaggaacttttaaagttaagggagcaattgttttggttgctgaaaaattagctgtcagtgaaccaacaatttatcgatatttaaagaaaatgtagaaagggtaagatgttatgaaagatattgtatttgtaagtgggcataagaatcctgatagtgattctatttgtagtgcaatcgcatacgctgatttcttgtttaaaattggtcgttataatgcagtaccagtaagattaggggaaattaataaggaaactgaatatattttaaagagatttcatttagaaatccctgtcttattaaaaactgtgaaacaaaaagtagaagatttagattatgataaagttactgttttttctaaagaattgactttaaaaacagcatggtctttaatgaaacaacaaaatttaaagagtgcaccagtttctgatgatcataatcaattattagggttactatcaacttctaatatcattgaaggatatatggatgaatgggatagtcaaatcctaaaagcagcaaatacaccaattgaaaatgttattgatacattggatgcaagtattttatacttagataaacaattaaaaacaattaagggtgaagtacatattgcagctatgactggcgaagaagccatgaaacgtgtcaatgaaaatgatgttgtaattgttggtggtgatcgtgatgaagcggttgaacatttgattaaagcaaaagtttctttaattattttaactgggtcacttgcgatttctaaagaattattagataagtgcgaagctgaacatattagtgtgatttcaacaccatttaatacatttatggcatcacaacaaattattcaagctattccagttgaatatgttatgcaaaaaggtggtttaatgactttttcaactgatgatacagttgattatgttaaagaagtcatgagtgaaacacgttttagaagttatcctgttttagattttatgggacgtgttgttggttctatttcacgtttccaagtcttaaatggtatgaagaagaaagttgtacaagttgaccataatgaaagaagtcaagctattgatggtattgaagaagctgaaattttagagattgtagaccatcatagagttgctgatattcaaacaattggacctgttttatttagatcagaaccagttggatgtacagcaacaattgttgcaaaatgttataaggaacatggattagagattccttctgatatggcgggtattatgttaggggctattattagtgatactttgttgtttaagtctcctacatgtacacctactgatacaaagattgctagagagttagctcaaatcgctggtgtagatattcaagaatttggaatggaaatgttcaaagcaggaacttcattagctggtaaaacagttgaagaaatctttaatcaagattacaagaagtttacttttggagatttatcagctggtgtcgcacaagtcaatacaatggatattgaaggatttgcgccttataaagctgaaatgttagcttatatggatcaagttgctagagaaaaccacatggaatttacaatgttattgttgactgatgtcatcaatgcaacaagtgaagtttttgtggctggacctcgtcctgattatgtagcgaatgcctttaaggtagaacttgttgatcagcaagcaagtttaccaggggttatttctcgtaagaaacaagttgttccagttattactgaagctttaactcaataattaaaaaataggttatactgtattatggtataacctatttgtctttttataagaaaatatcatgcttaaataagatgatgtttttttaaacaatgataaatcccatcgtcatctatatcgttagtgatttcatcagctgcatctttgacttcctgagaagcatttcccatggcaacagcaattttaaccaattcaaacatatcaatatcattatgaccatcaccaaaagccattgtttcatcaatggaaatattataatagtctaagacttttaaaattccattttgctttccaccttgtgaaggaataacatcaattgctaaatcatgccagcgtgtttttttacaatgtggcatagcttctaaaatttttgcctcatcatcttgggtgatatcatagggaataacttgatagatgggattgtcatagccgcgttttaaatcattgatatcaggtaatggtgtagaaattgcatcttgaacaatttgaacagcttgattgtgataattgatatacattaattctttttctacaaagatacaaggaaaagaatcattttcaatcaattgaataatgttgtgaatatcttgttgatcgattggtaaatcataaatcacttcattcttgttataacaatattgtccatttaatgtaatatagccatcaaattctaaattgtctaaaggaagatccttcatttcagatatatgacgtcctgtcgcaataaaggtataaatccccctttctctcaaacgttttaaagcgatttgagtggattgaggtattgtgcgtgtacgatgtgatagtaatgtcccatcaatatcaaaaaagattgctttaatcatttgagatacctccaaaatcatagtataatcattatagcataaagtgaggggaaggacatgaaaaatttagctcatagaggctatagtgcaaaatatccagaaaatacaatggaggcttttattaaggcctatgaaaaaggttttgatggggtagaaacggatgttcatttaaccaaggatggagtcttggttttaattcatgatgagaaaattaatcgaaccagtacggggaaaggttatgtaaaggatttaacaattcaagagttaagacaatataattattgttataagagttatgggcattatgatataccgactttagaagaattgttgaggtttattcaggataaggattttatagtgaatattgaattaaagacagatgttattcattatcaggatattgaagaaaaagtttatcagttggtaaaaagattaaaagttgaagataaagtctattattcatctttctatttaccatcacttttaaaaatgcgagaaattgatcctcatgtttatgttggatatttaatggaatttcactataaaaagaaatatcaagagctcattgaacatgatttaaaagcctttcatccacgatataattttctaacccaagaacatatcaaaacattaaaaaatcaaaatatttttattgcgacatggacagttccaaatttaaaagaatatcaacgtttaattgatttgggagtggacataataatatcaaacgaatattttaagtgaggtacaaagatgaaaacaactggcatggtgagaagaattgatgaattaggaagaattgttattcctaaagaaataagaaaacaattaatgatgaaagaaggagaaagcattgctttttctttggaagatgaaaaaattattttaactaagttttcaatggtgcataaaataagcaatagtacacaaatgttattggaaggtctctataacaaatatcataatacttttatgatttgtgataaagaaagcattgtgatttgttcggctgatggattagctaaatatcaaagaaaacgccttcctaaagatttggtattattgattgaaaatcaagaaaaacaaattgaagtgatgatggatttctttggtcaagaagaaaaagtgacaatctatccactttcacaagaagctgaatgtgttggagctttattgatgttgacaagacaaaccccatattatacaatggatgaaactttattagaatttataaaggacgttattgaacaggagatagaatcatgcgtttagataagtttttaaaagtttcaagaattattaaaagaagaacgttatccaaagaaattagtgaatcttcacgtgtaaaagtaaatggtaaaattgctaaaccatcaacaaaattaaagattggtgatgtgattgaagtggaatttggtcgtagtattttaactgtgaaagtcaaagaattacgtgaacatgttttaaaagatgatagttcaatgttgtatgaaattcttgaagaaaagaggaaagaagaagtttatagtgattagacttcttttctttttgcatatttttattgtttctatcataggatagcttaggaggtaaaaatatggataatagtttacattttgaacaaacaccttatcatcatatatgcttaaaagatcgtaagacacttgagttaacgggagtgaaaaagattgaaagctttgattcttatgagtttttgattgagacttctttaggttatttaaatattacggggagtgatttgactttagtgcgtttagatcaagatcaaaatgaagtgagtattaaaggaaatattgatagtatgagttatgtttctgataagaaaaaaccacatcaaaaagataaaatgtttaataagttattgaaataatgactttattagttcagtttcagtgtttattttattcttttttatttggttttgtgatgagtggtgtttatcatatcatgaatcgctttttatatgttgttcctgcttttattcgttatttgtttcaggttattattggatgtttttttgggattctttatttttatggattagtgatacttaatgatggaatcttaagattgtatttctttgttttgatatttattggatatttattttatcaaaagtattatgctttttcacttttatattatttagagaaatttgttttgcttttgaaacgaattatcgcaccttttcgcttcttttttcgttatattaatggtataatacaaaaaagagtaaagaaggtgaaattaaaatggcgaagaaaaaagaaccaagatataaaaaattcttaggactcatttatttagtgatttctgctgttttaatttacactttatgtgtgaatgcttatcgtgtagttggaagaaagcaagaattagcacgtttagaagaaagaaaagtggaacttgaaaaggaaaagaaatcgttatctgaagaagtgaaacttttaaatgatgatgattatgctgctcgatatgccagagatcaatatatttttcctaaagatggagaagaagttgtaaaattgcctgacactaagaaataagctaacgcttatttttttgtgttgtataaggagggacagtatgaatgtatcgtttcgtatgcgtatagaagaattaaaaagggatcgtaagattacggtttatttaccagaggattactatcatagtgataaacgttatcctgttttgtatattcaagatggacaaaatgcgttctttgatcgtccatcttatagtggtgtcagttgggggtttttggaatatgtgcaattgatgcatctagatataattatggtagcaataccatgtaattttaatgattttaaacgtatggatgaatatggaccttggccaattagtgaagaattatcttttcaggagactggaatgaaaggaaaaatcattggtggtgaaggagataaatatgtaaaatggatgattcatgaattaaagccttacattgatagacgttttcgtacaatgaaagatgatactggcattgttggaagttcaatgggtggtgtgattagtgcttatgcagctttggcttatcctgaggtttttcgtaagtgtgcagctttatcaacggcttattggttttatttagatgagtttgaagaagttattgatagtcatgagtatccaccggaaaatcgcttttattttgatttgggtgaatttgaaggttgtggaagtgagttaatggatgaatggtatattgaaagtaataatatgatttatagtttattaaaagacaaaatggaaaatttagcgtatcattattttgaaggggctaaacacaatgaaagtgaatggcgtcaacgtgtaccattatttatggaatttttatatgaggggtgaagaaaatgtataagatgatattatcagatttagatgaaactttattggtgaatcaccatgttcctaaagtaaatcaagaagctattttcaaagcaaaagagaaaggggtcaaatttgttccggcaacaggtcgtgcctttaacatgattggggaaatcttgcaggaaattgataactaccaaaaagaagatgaatattcaatttgttttaatggtggtttgattgttgaaaataaagatgcgaagattctttcttttcaaggattaccttttgatttagctaaagaaatgtttgaagtgggtaagaattttgatgtatgtgtgatgatttttactttggattgttgttatatttttaatgctgatcctgatgaagttgaaagaaagacggttcaaaaagcccgttttgaagttattgatgaatacaatatggacttcttaaaggatgatcatattgcaaaattgttatatgaaaaaagagatatggattatttaaagggaattgaaaaacaaattcaatcacatgttgaaggaagattagctgtaagttattcttcataccgttatttagaatttaatcctattggagtcagcaaaggggcagctttaaagtggttagctgattatttacatatggatattcaagaaacaattgcgattggagataattataatgatacatcaatgatcaaagctgcgggacttggcgtatgtgtctcaagtgcaacagaagatattcaggctatgtctgattatgtaacgaaggctgattatgatcaaggggcagttgctgaggttattgagaaatttgttgaaggagggcagatggatggcttataagattattgcgagtgatatggatgaaacgcttttaaatgatcagcatgcaatttgtcaaagaaatattgatttgattttaaaagccaaggaaaaaggtgtgaaatttgttcctgcgacagggcgtggatttatgtccattcaacatgatttaaagactttagggctttatgatgaggctcaagagtatgtgatttcttttaatggcggggctttaactgagaataaaaataatcaattgatttattttgaaggattgtcttttgaaaaaacaaaagaaatttttgaatatgggttacaatgtgatgtttgtcaacatgtttatacaaaagatacagtctatgtttttaatttatccaagtctgaagcacaaagaattaaagaccaaaaagttgaatgtgtgattatggaagaaaattcgattgattttttaaaggatgaaccaatttctaagattttgtatcaaaatactgatgttccttatttaatgagtttagaaccaaaaatgaaacatatttgggaaggtgaatgtgctgtaagttattcatctaatcgttatatggagtttaataagattggtgttgataaaggagctggacttaaacatttggctcaaatattaggtgtggatatttctgaatgtattgctgtgggggataattataatgatttacctatgttagaggttgcaggattgtcagtagctgcgcaaaatgctgttgatgatgtaaaaaaggtttgtgatataacaactcaagcagataataatgaaggtgtcattgctgagattattgaaaggtttattttatagttatggattttaagacactgattaatcaagaaagacaacttccttattatcagcagttagaaagttttgtgaatcaagaatatgcctctcacacgatttatccaccacgtaatcgggtttttcattgttttaattttaaagattatgatgatattaaagttgtgattattggtcaagatccttatcatgaagaacatcaggctaatggattggcatttagtgttgaacgtggggtacaaattccaccaagtttagtcaatatttataaagaagcacatgatgatgttggaattgatattcctaagcatggtgatttgtccgcttgggcacatcaaggtgttttattgttgaatacggttttaactgttcaagctcatcgtgcaaattcgcataaagataaaggttgggaaacctttacaaatcatattattgaagcgatgaatcaaagagaaaagccactggtttttattctttggggaaggcaggcaattgataaggcgaagatgattgatcaatctaagcattatgtgattacaagtcctcatccttcacctttatctgcttatcgtgggttctttggctctaagccattttctagaacgaatgcgtttttaaagagtcagggaattgaaccaatagattggaggattcgataatgtttgaaaatgtacaggatgctattgcatatattgaatcaagaagaaataaaagaagtattgatgaatttagagaaactttaaataagtgtcgtattccgatgaaacaaaagaatatgattcatattgctggaacaaatggaaaaggttcaacagtgaattatttaagaagtattttaaatgctcatggatataaagtaggaacttttacttcaccttatttgatttgtcataatgatcgtattcgtgttgatgatgttcctataagtgatgaagatttgttgtattatattaataagtattatgatgttattgaagaagatggcttatcaatgtttgaaattgatgttttgattatgttggcttattttgaaacattggatttggattatcgtatcattgaaacaggaattggtggattgcatgataagacaaatgttattgatccaattattagtgtcattacaaatattggaatggatcatcaaaaacaattaggtgaaagcatctatgatattattaatgaaaagatgggtattattaaacctcatcaaatgtttattaccagtgaaacaaaggggactattttagctcgtttacaagaacaatgtgatgcgcaaggagctatgatgtatgttgttccagaataccaggtttctcgttatcctttccatttccgttatcgtgatatggcttttacgcttgaaaatcaagggatttatcaagttacaaatgcccgtcttgctttaacgattgcttcaaagctgattcacctagattcaacgcttacaactccagcgattgaaaatgcctcatggaaaggacgttatgaaacattgccttatcatgaacgtagtgtagaaatcgatggcgcacataatgtgcctggaatcaaagcattgattcaaactttacgggtaaaaaatgagaaggatattagtattatcttttcgtgtttaacagataaagacattacaccaatgttagatatgatgcttaaggaaggatatactgtttatttaacaacatttaatgatgaacgtgcaattgatttatcaaatgttgaatcacgacctggattgattattgtggatagtttcatggaagctttaaaggctgcctatgtgaaaaaaacacatattgtgattacgggttcattacattttatttcacgtgttcgtaaatatttaattgaagaagcaaaaaaataaaatatttattttgagactattcattgtgaatagtctcagattgttgacaaagtggtaacttttaaaaagttgctacttttttcttttacttttttattataatttctttttcgcttattaatagtcttatttatatcgagaaagatgcctctctttgaagcatttttcattattcttttcttcattcttgccagttttcctaaattatggcacccaaaaataatcaacgattcatgttgattttttttaagtcctcttactcttgtaaatcttaagcaatgcttttccttgcaatctgcatataccctttctattgtttctttcctcaatggatatatttccttccactttggagtataccttatttcatttgcttcttctttatattcttcccacacatgtctcataatgactttctgatgatttttactttgtgtgcatttctctcttaatggacatgtttcacaatcttttggatttgacttatattccttatatcccgacttgtttgttgttgtataaacgagatcttttatatttggacagatataaatatcaagcttttcatcatatacatattcatgcttcttgaagaatcccttttttgtcattggtcttttatatgggaaatatggaacttttcctccatccaatacttctttgcatattgcaggtgtgacaaaccctgcatcaagacttacattttgaattgattcaccatatgtttctaacaatttttgataagcatcatgaaaaacaacgctatcatgcagattccctggcgctacagtattgtgaagcacaaatccatgtctatcacagaatgttaaatttgtatatgcaaagcatttttgtttctctcccttatgaaagcatccactttctggatcagtcgtgcttactttgattgatttcgttccttttccttcaattaattcgccagtttcttcgtcaaatgccaattctatatcttctgtcttcttgagttctttctttccatgactttttctgtcttcattgatttcttttaataattcatcatcgtaatgtttctttgcaatttcaacaactctattttcatgctttctattgtttgcatttgccttcctatgtgtcccatcgccaaaaactgtttcaaggtcaacaaaatcatatgcaattgcctcttttaaaatgcgagtgaatatcttatcaaatatttctgattcaccatatcttcttatataattctgagaccatgttgaataatctggaaccttatcctcaatagatagacctaagaaccatctatatgcaagattaacttctatttctttgcatgttcttctcattgaattgatcccaaatgtaaaattaatgaaaatcattttaaaaagtatcactggatctatgctgggtctgccaaacaagctatatagtggtcttgcctctggatagataaaattccagtcaatagcttcttcaagttctctcactttgtgatcctgtggtactaattcatcaatcgtactgaaaataaaacagtctttttttctattgtttaaacatgtcattgccatataatatttctcctattcaatccatctatattatatcatatttgagtataaaaaaagacaaaaagagccataagttttggattgaatagtcgtctttttgtcttaaatattttatcatacttcccaacaaaagaaaagactgttgacacatttactttgtcaacagcctgagactattcattgtgaatagtctttttttcatatagtataggttatagaaggagagtgataaggatgaaagtagttcaacttgatcaagaaaacgcaaaagcggttgccaagcttatgcatggaataaaacccgaatggtggccaacttttgaagatgcttatggtcaactcacaaacattgatgaaagtattggcacagttggttggtatttatcagatgagaatggcaatcccctaggatgggcactgtttagggaaatgaaagcatatttatctttagaattagagtgttctggttttaatgataagggtgtttttaagctagaacacaaacttaaagatttatttgatgttgcagaaaaatatgcaaaatctaaaggttatacaacattaagaactggtatgagttctctagattttaatattgatggacaaagaatagataatattgctgaagctttggaatctttaaaaacgcaaagagttgattattattggttattagattatggttttagagttatggggatacatcctaatgcttatggaaataatatgcattgtattttatttgttaaagaattagagtgaaaatttaattcctgaattaaaaaaggcaatattgccttttttaacgtgtattgaaattaattggttcatcaaattctgcccaatcgaaataaacgaattggaaaagatagaatttttgattctttggatcacgaacaataaaatgatcccttccaacttgttcaataatacctttgtatgcacgatcacgccaatcagtgctgccagtataggtaaaatagaatgtcccaagcttaccaatatttaaacgtaaaatattctctaaataagtttgtgtagatattggtgttggtaatgcagcagtttgtgaagtctgcattccttgcaaaattgattgattatcagtattagtatccatagaccctcctacaagtcacaatttaattttcccccaggggcataaaaacaatggtttttgtatcgaccagtgagatttccataaaattgatctgggcatgatacccttgctccagggtttttaaaccataaggcatcataagctggttcgacacgatatccgtcgatatttcttaatgcaagttctcgctctttagcgttgacgggttggttgaaaagtggctgatcaaccccagcaaaagcatttttttggtaaacaacctcataaatattgcgggtgtttttaaaaacatcacaattagcaacaacccgattaataataacatttcctaccattaacattccttcgtcaccttcaccaagagcttctgatttcatgattctggctaataattcaacgtcagaatcattgtatgttattcttggagacaaattcatcacctctttttaatatatgcaattgtaaagaaaaattgcttaaattcaaaaaagattggaaagatgaatgaaatttcgatattgtaaaaaattgaagattttttatttatgaaaatgacatgaaattgtgtttttttaactaagtttgtgatagaatagatttataggtaagcactttcacattcaaagtttaggaggaaaaaatatgagtaaagaaattgttgcgatgatcctagcaggtggtcgaggaacacgtctggaagctttaacagctaaagttgcgaaacctgctgtctattttggaggaaaatacagaattattgactttcctctaagcaactgtgcaaactcagggattgatatcgttggcgttttgacacagtacgaatcagtattattaggaagctatgttggagctggttctaagtggggacttgatggaaataactcacttgcagcgaatttaccagcacgtgaaagaggggaagttggtgccacttggtatgccggtactgctgatgcgatttatcaaaatattagtttcttagatcaatatgatcctgaatatgttttgattctttctggtgaccatatttataaaatggattatgctgatatgctggctgctcacaaagctaaaaatgctgatttaactgttgcagttttaaatgtatctatgaaagaagcaagtcgttttggtatcatgaatacaaataaagatggaacgatttatgagtttgaagaaaaacctgaaaaacctaagtctacattagcatctatgggtatttatattttcacttataaagaattaagaaaatacttaattgaagatgctaaaaatgaagaaagtaaacatgactttggtatgaatattattccaatgatgttaaatgaaggtaagaaattatatgcttatgaatttgatggatattggaaagatgttggaactgtagaaagtttatggcaagctaacatggacttgttagatgataaagaattagatctttataacatcaagaaagattggaaaatttacactgaagatacattgagtaaacctcaaattattggagaagaagcaagtgttaagaattcacttgttactcaaggatgcattgtcaatggtgatgtagagggttctgttttatttaataatgtttatattggtgaaggtgctaaagttgttgattctgtcttaatgccaggggtattgatagaagaaggagcagaagtttacaaagctatcattgatgaaggtgtcgttattaaagctaagaaagttgtcaacaaggatgctaaagtagtagaacttgttagtgacaatgcgagatagggggttaacaaaatggcaaaagtcgttggattagtaaatttacactctgatgtttcttataagggattaactgaaagaagaccagttgcatctgttagttttttaggaagatatggaattattgattttgttttatctaatatgtctaactctaatgtagatactgttggggttttgattaaagaaaaaccaagatctttgtttaaacatttaggaaatggaaattcatggaattttaactctaaatctggtggggtttcattgttatataatgaaaaatatgcaaatagccctatgtataatcatgatattaataatttggttgaaaatattgcgtttttagaaaaagcaaaagcagattatattgtcattgcaccagcacatattattacaactatgaattatgctgaagtcattgatgctcatgcaagatctggggctgaaattacaatggtatatcaaagaattaataatgctaatgagtcatttgttggttcagattatttaagattaaaaggtaaacaagtgactgaaattaaaaagaataaaggtaatcgtaaagaaagaaatatttcattagaaacttatgttattaatgcaaaagttttattgaaattaattgattatgcgaaaaagattagttctttctttgatttaaaagatactttagcttatttatgtgatgaaagaaaaatcatggcttatgaatataaaggattcgcaagatgtattgattcttatgatgcttattataaagtaagtatggaattcttagatatggacgtttctactcaagtattcaagagtacatggccaatcttcacaaatacaaatgatacacctccaacaaaatatctaaagaatgcacaagtgaagaaatcatttgttgctaatggggctattattgatggtgaagttgaaggaagtattctttctcgtaatgttattattggtaagaatgcagttgttaagaattgtattattttaaatggatctaaagttagtcctggagctcatcttgaaaatgtaattattgataaagatgcgcgtattgaaaagaaaactgaattaattggtgacgcagaacctctttatgttaaagaaggagatgttgtttaatgagaatcgtttttgcaacaagtgaagccaatccttatattaaatctgggggattagctgatgttttaggatcacttcctaaagcactcgttcaaaagggtcatgaatgtattgttgttttaccaaaatatcaagatatgaaattagctgatacattggaatatgttatgagttatgatatttgggtaggatggagaaaatgttattgtggtgtctttaaagctgagtacgatggtgtaacttattactttattgataatgaacaatattttagaagacctggattatatggatatgatgatgataatgaaagatttgcttattttgattttgccgttttagaattattatcacatgtagatattaaaccagatattctacatttgcatgattggcaaactgctatgattgcaactttatacaaagaaagatatgcttattatgaatattatcaaggaattaaagttgtctttacaattcataatattgcttatcaaggaaaatgtgatccagcattgttaagtgaccattttggtttggataattatctttactataatggaaattgccgtaatgatggatgcttcaatatgatgaaagctgctattttctatagtgatgtgattacgactgtttcacctacttatgctcaagaaatcttaactgatagttttggtgaaggtttacaaagtattttacaaatgcgtcgacatgatttgtatggaattttaaatggggttgattatgatacaattaatccatctactgatccacaaattgttgaacattttgatgaaacaacagttgatgaaaagaaagtcgcaaataagttagcacttcaaaaagaatgtggacttccagttgatccagatattccattgattggaattgttacaagattaacttggcaaaagggactagatttaattattaatcgtatggatgaattaatgaaacgtgatgtgcaagttgttatcttaggtgctggtgatttgaaatatgaagaaccactaaaaggatttgccgcttatcataatcaaaaattatcattaaatttaaaatatgattttggtttatcttgtcgtatctatgctggttgtgatatgttcttgatgccatcattatttgaaccttgtggtttatcacaaatgatgtcattacgttatggaacaatcccaattgtaagagaaactggtggattgaaggatagtgttgaaccatataatgaatttgaaaatacgggaacaggatttagctttaagaactataatgcacatgaaatgatggaaattattgattatgctttagaagtttataaagataaagacaaatggcgtggattagtgcatcgtgcaatgaatgctaaacttgattgggacaaaagtgctgatgcctatttgaaagtttttaattcattgttagattaggtaaaagggatagggaaaacctatctcttttatgctgaaataagaaatgatttgctttcttgtttattgtttagtacaatggatgtggtaaggaggagaaaagatatgcgtactttcttgaaaatttttactgtcatagcattgattttggttttctttgcatgtggaaaaaaagaagtcgttgtttctttggaaaaagaaggcgtcgaatataaagttggcgaccaagtttctttttactatcctaaagattttaccttagatacaaactctgaaaataaacaaatcatacgttttataaaagatgaagaagttatcacttatacaactattcaagatgatacagataataagcttgaggatatgcctgaactttatgctgggcaacttgaagaagatggagcaagtgaagttggttataagacagaggaaattgatagtggtttgaaaatttatgagtttactggtatctttgaagcaacaggtataaaatttgaacatgttgtttatttcactgatcaagcaacatatgattttgcttaccttgctccacaagaagtttatgatgaaaatattcatgtaatattacaatatttacagtcgttaactgttcatcattattcttgataaataaaattgaatttgatatagtataaataaattataagtaagaatgaagaatgaatgaaatggatagagagagctgggatggtggaacagcttcacggatgattttggatgcacttacttgagtcttttgaaaagaaagaacgtaaacttgcgttaaaagtaatggaaagcatacaataaggtggaggcataggaatgctctttattgtttgcttttttcattttaaaggaggaaactatgaaattatttaatactttaacaaataagaaagaagaatttgtcccaattaaagagggagaggttagtatttatgtatgtggacctacggtttataattatgttcatattggaaatacacgaccaatgattgtttttgatgttttaagaagaacttttgaatatttaggatataaagtgacttttgtttctaattttacagatgttgatgataagattattaaggcagcaaaggctgaagggattagtgagaaacaattaacagataagtatattaaggcttatgaagatgtgagacgtggattgaatttattatttccaacttatgctccacgtgtaacggaaacaatgcagccaattattaattttattaaggatttggttgatcaaggttatgcttatgaagttgatggtgatgtttattttagagtgactaaaattaaagaatatggaatgttatcgggaattaaggttgaagacttgattgctggagctagcgaacgtgtggatgacaatgataaaaaagaaagctctacagattttgctttatggaaaaagacagatgaagggattcaatttgatagtccatggtctaaagggcgaccagggtggcatactgaatgtgttgtaatgattaatgatattttcgatgatggtcgcattgatattcatggtggtggacaagatttaaaattcccacatcatgaaaatgaaattgcacaatctatggcttgccatcatcatccaattgcaaatgtatggatgcataatcagatgattaatattaataatcaaaagatgtctaagtctttgggaaatgttttatgggcaaaagatttattaatggaattaggatgcaatgtctataaatggttaatgctttctacacattatagaaatccattaaactttactgaagatgttttgaataatgtgaaaaaagaagtagaaaaagtagaaaatattattaaacagacatcactttatttacaagttaatcattataagagtgaagaattttgcaaagaaagtgttgatcaaatggttgaggctttgtcagatgatttaaatacatcgttagctttaactcagattcttggacaagttaaagttttgaatcaagcaatgcgcaacaaagataaagataatgcaatgatttcaaaaggatatcaaacattattacgtatgcttgatgtggtgggatttgttcatgaggttaaggtgttaagtgatgaagatattgaattatatcaacattggcaaagtgaaaaggcagctaaaaattttgaagtagctgatcaattaagagaaaaattgcaggcaaaagggattatttaagatgagaccagatttaatgaatgctttagctttggcctatttaggtgatggtgtttttgaggtttatgtcagagaatatttgattgtagaaaagcaaatcacaaagcctgatttattacagaaagaagccattcgttttgtgagtgcgaaatctcaggccgcttttatgcaagcagccatggctaataattgggtcagcgaagaagaaataagaatttataaacgtggaagaaataccaagagtaatcgtgtgatgaagaatacaagtgttattacacataatcaatcttctggttttgaagcattgattggacatttgtatttattgaagaatgaagaaagaattcaggagatttttgagttatataagaattttgtggaaaataattgataagctaagagtttaagatatgaggagtaattatgagacaatatatttatggaaaaaatactgtttttgaatctttaaagggaaataaaccggtgtatgaggtttatatgatgaagaatgtaaaagatgaaaagttaatggctttagcgaaaaagaagaatgtgaaagtgaatatagtggctcaaaagagtgtcttaaataatcttgttgggaatgttgttcatcaaggaattgtggcacaggtggaaggttatgattattatgaaattgatgagattttatcatcgattccgcctcataaacaaccactcttattgatgcttgatggtttagaagatcctcataatttgggagctatcttaagaacttgtgattcgattgaagttgatggggtcatcattggtaaaaatcgtagtgttggattaactccaacagttgctaaggtttcaactggtgcgattgattatgttaaggttgctcaagttaccaatctttcgagaactttggaagatcttaagaaaaaaggcttttgggttgttggttgtgatttggatgaatctcaggattaccgagctgttgattataatatgccacttgttgtggtggttggctcagaaggctttggaatatcaagattggtgaaatcacaatgtgattttaatgttgttttaccaatgtgtggacatgtgacttcacttaatgcttcagtagcgacagctttgattctttatcaaatttataattctcgtcatcccctataagaagaagggaggtaacgatggaacgttacaatgactatgaattactttatttgtttcattgtggtagtgatgaggcgaaagaaattttatatcatcgctactataagttagtagcaaaatgggttcaaccttttttataccatggtcgtattcatggttgggaatttgaggattttattcaaattggcatgttagccttctttaaggctattgatagttatcgtgatgataaacaaaccagtttaaagacgtttatgaaaggtaatattttaaaacgagtcatcagttgtgtaaggcaaggacattgtattgaagaaaaaatcaatgcaattgagttttcattggataattggttggatgaagaagaacaatatcgttatgaagatgttgtcgcagaccccaatgaagattatcagccacatgcttccttaattgtgaaagaacaatcaacatattatcaagagcgaatttatgcagtgacttcacctcgtgaataccaaatcttactttacaaaaaagcgggttatgaggaagaagaaattgctaaaaagctgaatataacgcttagaagtgtatataatgcagtttatcgttgttcaaagaagatagaaggcattgacgagtttgaataaatgtgttaaattataataacggtaaaggagtgatgggcatgaaacaaaaagttatcttggtatgtagtgaatgtttgtcacgtaattattcagttacaaaaaataaacgtgtaaacgtagaaagattggaactaagaaaatattgtaagaaatgtggaaaacacacaattcataaagaaacaaagtaggaggaagcagatgaaaatcaaggaatggtgtacgcttaaaggtatacgaagtgaaatcaaaaatatccattggttgacaaaaaaagaattagcttataattcgatgattgttttagttttttgttttttattcggagtatatttttatggcagtgatgcaattattgcattaatcttaaaggcattggggatgaattaatatgtcaggaatgaatgatgaaggaagacgctggtatgtagtcaatacttattcaggtcatgaaaacaaagttaaagaaaacttagaaaaacgtgttgaatctatggggttacaagattgtttattcaatattgttattcctgaacatgtggaaactgaaattaaagatggtaagaaaatcaataaaacaaaaaacatgtttcctggatatgttttagttgaaatgattatgactgatgaagcttggtatgttgtacgtaatacatcaggggttactggatttattggttcttctggtggaggagctaaacctttcccattaccaaaagaagaaattgatccaattttaaaaagaatgggaattcaaacttcacaattagaaattgattatgaagttggcgatgaagtgaaagttctttctggaccatttgcgggtagacaaggaaaagttgaagcgattgatcgtgaaaaagaagtggcaactgttcttgttgatttcttaggaaatgcaactcctatggaaattgaattagttcaattagaaagagtggatttataatgatgagacctttgggtctctttttatttaaaaaagtttgataaattcaataaaaacacttgcattattgaaaagattatgtataataattaatcgacgcaatatgtgttactatgcgtgggaggattgacatccaactgaccacagcacggacaaattttaataggaggtgtgtcgcgtgagcaagaaagtcgtaagagttatgaaaattcaattcccagctggtggggcaaaaccaggtccagctttagcaggtgctggtattcaaatgccaaaattctgtacagctttcaatgatcaaacaagagatcgtatgggagaaactgtaccagttgttttgacaatttatgaagataagagctttgaattcgttttaaagacagctccaactgctgaaatgattaaaaaagcatgtggtattaaaaaagcagcttctgatgctaaacaaacagttgctactttatcagctgataaattaaaagaaatcgctgaatacaaaatgccagatttaaatgcaaatgatttagaaggtgcaatgaaaattgtagctggtactgctcgtaatatgggtgtaaaagttgaaggcttagaagcctaatttaatgaagaggagaaaagaaaatggctaaaaaaggtaaaagatatcaagaagccgctgctcttattgaaaaaggtaaagcttacccaattgaagaagcagttgctttagtaaagaaaacaagtaatgtaaaattcgatgcaagtgttgatgttgtattcaaattaggattagacacaagacatgctgatcaacaattacgtggagcaatcgtgttaccacacggaactggaaaaactaaaaaagtattagttgttactcaaggagctaaggttgaagaagctaaagctgctggagcagatgttgtaggtggaaaagaaatcttagaagatatccaaaaaggatggttagatttcgaagttatgatcgctacaccagatatgatggctgaattaggtaaattaggtcgtatcttagggcctaaaggattaatgcctaaccctaaaacaggaacagtaactatggatgttgctaaagctgttcaagaaactaaggctggtaaagtgacttaccgtactgataaagatggtaatgtgcatatgccaatcggtagagtttcatttgatgatgaaaaattagcagaaaactttaaagtgatttatgatttattagttaaatctaaaccatcttctgctaaaggaacttacatgaagaacgttgttatttctacaacaatgggtcctagtgtaaaagttgcttctttataagaagtataaattagtcgcaatcaatataccgtagacagcaacggggaaaccttaattatgttgccgaggtgatattgtcaactcacattgacaaaactccctcgttttagggagttttttaacggatatattgttgcatatataaaaattttataggaggtgtaacaatgtcaaaagaaatcttagaggctaaacaacaagtcgttaatgaaattgctgaaaatttaaagaattctcaatcagcagttgttgttgaataccgtggattaactgtagctgatgtcactgaattacgtcgtgctttaagagctgaaaacgttggattcaaagtgtacaagaacaaattagctcaaagagctacagaagaagctggtatggcagaattaaacgaatatcttgttggtcctaatgcaatcgcttttggtcatgaagatgcagtggctcctgctagaattttagcagagttcgctaaaaaacacgaagctttacaaattaaagctggttatgtagaaggtaaattcttacctaaggaagaagttatggcagtagctaaattacctaatcgtgaaggtatgtactcaatgttacttgcttgtatgaaagaacctgttgcaaaagtggcaagagttattcaagctgttgctgatgcaaaaggtggagaagaagcagcacctgctgctgaatagttaatcaaaaatatcaacggaggaaaataaaatggcaaaattaacacatgaagaaatcttagcttacttagaagaagctacaattttagaattaaatgaattagtaaaagcaatcgaagaaaaatttgatgtaactgctgctgctcctgtagctgtagttgctggtggagatgcagctggtgctgatgctgctcctgcaaacgtaacagtaacattaactgatgttggtgctactaaagttgcagttatcaaagctgtaagagaaatcactggattaggattagttgaagctaaaggtttagttgacaaaactccagctgaaatcaaaaaagatgttcctgctgaagaaggagctaagattaaagaacaattagaagctgctggtgcaactgtagaagttaaataattgttacacacattagagccctttaagggctctttcttttttaaggagaaaaataatggcacattattatacaaataatattgatttaaaatcacaagaaacaaagattccttttgattatcgtgatcatcatttaacttttgtgagtgattttggtgttttttcaaaagatagagtagattatggttcacgcgtattgcttgaatgtatgaacatttcatcatctcatcaatctttactagatgttggttgtggctatgggactttaggtatttctttgaaaaaagaatatccatggttgcatgttgaaatggttgatgtgaatgaaagagctgttcatttggctaatgaatcgattcgattaaatggtgtggatgatattgaggcttatgtgagttcaatttatgaaaatgtttctcattgttttgatgtgattgtttctaatccaccaattagggctggtaaaaaagttgtttttgatattttggaaaaagcttatgatcatttaaacaatcaaggtgaattggtgattgtgattcaaaagaaacagggagctccttcggctaagaaaaaaatggaagaagtttttgggaattgtgaaattgtaaaaagagataaaggatattttattttaaaatcgattaagcactgattttttaaatttcaaaagaaattttgaaatttttgatttggtattgacttcaactagtctctatgctagtataatacaatgcctactcatgtataaaaagcagtgttttttcgctatgctttgatgatggagatagagataattgataaggagtgaagcggacttggaaaagaatgtaactcaagcaaaaagtcgtattaatcgtcgcaattattcaagaattagtggttctttagagctacctaatttagtagaaatccagacaaattcttatgaatggtttaagactgaagggattaaagaggtttttaatgatgtttatcctattagtaacttcaatgaaacattaacattagaatttgttgattgtcgttttgatgaaccaaaatattcagtagatgaagcaaaggatagagatgctaactattcagcacctattcgtgctacccttcgtttagtgaataacggaactggtgaaatcaaagaaaatgaagtctttatgggagatttccccttaatgacagattcaggtacttttattattaatggtgctgaacgtgttattgtttcacaattagtacgttcaccaggagcatattttgcagatgctatggataaaagtgggaaaactgtctttactggtagtgttatcccatcaagaggaacttggttggaatttgaaaatgacgccaaggatgttttaaatgtgcgtattgaccgtactcgtaagatcccaggtactattcttttacgtgctttagggttaagtagtgatgaagatattattgaagtgttaggtgatcatgagtttattagaaatactcttgcaaaagatccaacacataacactgatgaagctttaattgaaatttataacaagttaagacctggtgaaccagcaactttagaaggtgcaaatacgcttttatttgctaagtttttcgatgcaaaaagatatgatttagcacgtgctggacgttttaaactaggtaagaaattaagtcttttagatcgtattacaaatcgtgttttggctcaagatgtcaaagatattgatggaaatattgtgatggaagaaggaactttattaacaaaagataaagttgatcttttagcacctgtttttgctgctggagcacattgtattgatgtgaaaacaaatgaattaatgaaatcacatggtagagttcaagtgattgaagtttatgtagatgaatctaaatctaaaaaaatgaaagttgttggaactgatttatcattagattgtaaatttgttacaatttctgatatgttagcagcttattcatatatgttaaacttagtggatatttatgattcattagatttagcaagtgacgatagagtgaacttaatgagcagaattggtctattagatgatatcgatcatttaggaaatagacgtgtgcgttcagtaggtgaattaattcaaaatcaatttagaattggtttatcaagaatggagagagttgttaaagaaagaatgtcattatctgaagtagatagtgtaacacctcaatcattaacaaatattcgtccattaactgcagcgatgaaagaattcttctcatcttcacaattatctcaattcatggatcaaatcaatccattagctgagttaacaaataaacgtcgtttatctgccttagggccaggtggtttatcaagagatagagctggatatgaagtgcgtgacgtccatccatctcactatggtcgtatctgtcctattgaaactcctgaaggtccaaacatcgggttgatttcaacacttgcttcttatgcaaaaattaataaatatggatttattgaaacaccttatcgtaaggttaataatagtatcattaacgaaagtgatgtgcgttatttaacagctgacgaagaaaagaattatattattgcccaagccaaagtgcaaattggggaagatggtcgtatcttagatgaacaagttattgctcgtcatttaggagaaaacattatggcgaagccagaagaagttgatttcatcgatatttcgccaaaacaaatcgtatctgttgcgacatcatgtattccattccttgaaaacgatgatgccactcgtgccttaatgggtgccaacatgcaacgtcaagctgtacctttattaaatccacatacaccatttgttggaactggtatggaatatcaagcagccagagattctggagcagcagttgttgctaaaaaagaaggtttggttacttatgttgatgcgaaaaagattattgttgaagaagatactggtccacataaatatcgtttaactaaatttgcgatttctaatgctggaacttgtattaatcatagaccaattgttaaagttggagataaagtcttaaaaggacaaatcttggctgatggtccttctatggaacaaggtgaattagctttaggacaaaatgtcttagttggattcatgacttggaacggatataactatgaagatgccgttatcatgtctgaaagattagttaaagaagatgtatatacatcaattcatattgaagaatatagtattgaatgtcgtgatacaaaattaggcccagaagaaattacaagagatattcctaacgttggtgaagaagctcgtaagaacttaaacagcgaaggtatcattatgattggggctgaagtaaaagaaggagatatcttagttggtaaggtgactcctaaaggacaagctgaattatctgctgaagaaaaacttttattagctatctttggtgaaaaatctagagaagttaaagataattcattaagagttcctcatggtggtgctggtattgttcatgatattaaagtctttgaaagaaagaaaggcgatgaattacaaccaggtgttaataaggttgttaaagtttacatcgttcaaaaacgtaaaatctctgaaggagataagatggctggtcgtcatggtaacaaaggggttatctctaaaatcttaccaattgaagatatgccacacttagaagatggaactgttttagatatcatgttaaacccattaggggtaccatctcgtatgaatatcggacaagttttggaattacacttaggttatgctgcaagagaacttggaatgtactttgcaacacctgcctttgatggtatcaacgctaaagatttggaagatattatgaaagaagcaggaatgccagttgatggtaaacaacctgttatctcaggtcgtactggagaatactttgattcaaaagtatctgtaggtatcatgtatatgattaagttagcccacatggttgatgataaattacatgcaagatctgttggtccttactcattagttacacaacagccacttggtggtaaagcacaaaacggtggacaaagatttggggaaatggaagtttgggcacttgaagcttatggtgctgcttacacattacgtgaaatcttaactgtgaagtctgatgatgttgttggacgtgtaaaaacttatgaagcgattgtcaaaggacaaaaattacctgaaccaggattacctgaatcattcagagtattaaagaaagaattacaagccttagcattggatattcaaatgttagatgctgatggtcatgaattagatgaaagaaagattgaagatgaagaacgtcgtttcccaacttcaattgatacaactccagaaccagaagaagcaactcaagaagttgttgaagaagaggtagaaggagatttcttagaagaagatgaatcatttgatgatttagattctgtaattgatgaactcttcactgatgatgaagaagaaagtaacgaagagtaggagggaacaatgaatggcagatgtcaataacttttcagcaatccaaatcggattagcttctccagaaaaaattcgtgaatggtcttatggtgaagttaaaaaacctgaaactattaattatcgttctcaaaaaccagaaaaagatggtttgttctgtgaaagaatctttggaccatctaaggattgggaatgtagctgtggtaaatacaaaaaggtcagatataaaggtgtaatctgcgatcgttgtggtgttgaagtcacaaaatcttcagtccgtcgtgaacgtatggggcacattgaattagcgactcctgttgctcatatctggtacttaaaaggaattccttcaagaatgggacttatccttgatatgtcaccaaaacaacttgaagaaatcatttactttgtatcttatgttgttacggataaaggaagtacaccattagaatacaagcaagtattatctgaaagagattatcgtaactgttatgaaaaatttggtcatcaatttgaagcaaagactggtgcagaagctatcaagatcttgcttcaaaaagttgatcttgatgaagaatttgaattggttactaaagaattaaaagaagcccaaggacaaagacgttctaaattgttaaagagacttgaagcgattgaagcctttagatcttcttgcaatcaacctgaatggatgattcttgatgtgcttccagttattccacctgatttacgtccaatgttacaattggatggtggacgttttgcaacaagtgacttaaatgatttatatcgtcgtgttattacacgtaataatcgtttaaagaaattgttagaattaggaacaccttctattatcgtgcaaaatgaaaaacgtatgttacaagaagcggttgatgctttgattgataacggtcgtcgttcaaaaccaattaccggggctggtggtagaccattaaaatcattgagtcatactttaaaaggtaaacaaggtcgtttccgtcaaaacttacttggtaaacgtgttgactattcaggacgttcagttatcgcagttggtccagacttaaagatgtatcaatgtggtattcctcgtgaaatggcattaaacttatttaaaccatttgttattagtggtttagtgagagaacagattgccacaaatatcaaggctgcagaaagattaattgataagatggatgatgcgatttggccaatcgttgaagaagtcattaaagaacatccagttttattaaaccgtgcacctacacttcatagattaggtattcaagcattcgaacctaaattagttgaaggacgtgcaatccgtcttcacccacttgttacaccagcattcaatgccgatttcgatggtgaccaaatggctgtccatgtaccattaggtgaagaagcaattcaagaagcaagacaattaatgttagggtctggaaatatcttaggacctaaagatggaaaaccaatcgttacaccatctcaagatatggtgcttggtaactattatttaacattagaagaagctggaaaaattggtgaaggtagtgtttttgctgatgtgaatgaggttttaatggcatatgatgctaaaactgtacatttacacacaagagtagcaattagaggtaaatctttaaagaataatactttcactgaagaacaaaacaatagttatttaattacaagtgttggtaagattatctttaaccaaatctttgatggtaatttcccattcatcaatgatccaagtaaagaaaacttagaggcaacacctgctaaatattttgttccaatgggaactgatattaagaaacatattcaagaacaacctattattaagccattaggtaaaaaggctttaggtaatattatcgatgaagcatttaaattgaataagacaacagaaattacagaaatgcttgataaattaaaaaatcaaggattctattattcaacaattgctggtattacagtatctgtatacgatatccaagtaccacaaagtaagtacgttttatttgatcatgctgatgaaaaacttgaagttattaagaaattataccgtaaaggtaaaattactgatgaagaaagacataacattgttattaagttatgggaatctgttaaagatgaagtgcaagctgtcgtaaaagaagaattcgaagctgatgctaaaaacccaatcttcatcatgtctgactctggtgcccgtggtaatatctctaactttactcagttagtaggtatgcgtgggttgatgtctaaccctaaaggggaaacaattgagttacctattaaatcttcattcagggaaggtttaacagcatctgaattcttcatttctacccatggtgcccgtaaaggttctaccgatacagccttaaagactgccgattctggttacttaacaagacgtttggtagacgttgcacaagaagtgattgttactgaagatgactgtggaactgatagaggattcatggttactgaattatataacacatctgacaattctgttatcgttccattatatgatagacttgttggacgttattcacaaaaagatattgttcatcctgaaactggtgaaatcattgttaaagctggcgaaatcatggatgaagcaacagctaaagaaattactgatgctggaattaaagaagttgaaattagatctgtacttggatgtaaagcaaaagatggtatctgtagaaaatgttatggacgtaacttagcaacaggtgaagaagttgaaatgggagaagctattggtattatggctgcacaatcaatcggtgaacctggtacacagttaacaatgcgtacattccacatgggtggagttgctggtggagcagacatcactcaagggttacctcgtattcaagagttatttgaagctagaaatccaaaagctaaatctattatttctgaaattgaaggtgaagtttctaacatcattgataacaatggacgtgctgaagttgttgtttctaacttattagaaacaaagagctatttagctccttacggtgcaaaattaagagtatctgtaggcgatgaagttggtattggtgctaagattactgaaggttcaattgatcctaaagaattattagcagttgctgatgtagaagctgttgaaaactatatcttaaaagaagttcaaaaggtatatcgtttacaaggtatcgaaatttctgataaacatatcgaagttattattcgtcaaatgttaaagaaaattcgtattgttgaaggtggagatactggagcattacctggtacacatgttaatgtacaaagatttactgaattaaataaagaagtcttaaagaatggtaaacatccagctgttggtagacctatcttattaggtattacaaaagcttcacttgaaactgaatcattcttatcagctgcatcattccaagaaacaacaaaaatcttaacagatgctgctattaagggtaaagttgatcacttaaaaggattaaaagaaaatgttatcattggtaaattattgccagctggtacaggattaagagggcctttaaaatctcctgaaacaattgcaagagaggaagaagaagctcgtaaggaattagaattagaagaagctgaaaaattagaagctgaaactctttctgaagatttattaagtactgaagctgatgaagaatttacaaatgttgattaaataagtggagcaaggtaacttgctccatttaattttattgataaattcaaataaatttgaaaaaagtgttgactttcgtctatcattcatctataatcatctacggtgctcaggattgagtacatttattctgataaaaaatgaaacacccggaattgtgtgttaagaagaaaggaaaggagacaaaatatgcctacaattaatcaattagtaagaaaaggacgtagtgaaaaaacatctaaatcaaaatcacctgcgttaaatagaggatataactcattattaaaaaaaccaactaatattagttcacctcaaaaacgtggagtttgtacacgtgttgccactatgacacctaagaaacctaactcggctttacgtaaatatgcccgtgttcgtttatcaaacggtatggaagttacagcatatatcccaggaatcggacacaacttacaagaacacagcgttgtgttaattcgtggaggacgtgttaaggacttaccaggggttcgttatcatattattcgtggtactatggactgtgctggtgtaaaagatcgtatgcaaggacgctctcgttatggagctaaaagacctaaaaaataagagataggaggaaaaactgatgtcaagaagaggacgcgtagcaaaaagagatgtactaccagatccaatttataattctaaggtagttacaaaattaattaacaacatcatgcttgatggtaaaaaaggtgttgctcaaaacatcttatatgaagcatttaaaaaagttgaagaaaaaactggaaatccagcaatggaagtatttgatcaagcaatcaataacattatgcctgtacttgaattaaaagtaagacgtattggtggagctaactatcaagtacctgttgaagtatctccagaaagaagaatgacattaggtttaagatggttagtcaattactctcgtttaagaaatgaaaagagtatggttgatcgtttagctaatgaaatcgttgatgcatctaatggaactggggcttctgttaagaagaaagaagacactcataagatggctgaagctaataaagcattcgcacatttccgttggtaatataaagagactatttgaaaggagaaaattatggctcgtgaattttcgttagaaaaaactcgtaatattggaatcatggctcatatcgatgctggtaaaacaacaacaactgaacgtgttctatattacacaggaaaaattcataagattggtgaaacacatgatggtgcttcacaaatggactggatggaacaagagcaagaacgtggtatcacaatcacttcagcagcaacaactgctcaatggaatggataccgtgttaatatcattgacactccaggccatgtagacttcactgttgaagtagaacgttctttacgtgtacttgatggtgctgtcactgtattagactctaaagctggggttgaacctcaaactgaaacagtttggcgtcaagctacaacttatggagtacctagaattgtattctgtaataaaatggatgcaactggagctgacttcttaatgtcagtagaatctattggtaaaagattagatgctaacgctgttgctattcaattaccaattggtgctgaagatacattcgaaggattaattgacttaatcaaaatgcaagctgttcattttgaaggagctaaaggagaaaacgttgtttactctgaaattcctgaaaacatgaaagctcaagctgaagaatatcgtcaaaaaatgattgaagctgctgcttcattcgatgatgatttaatgatgaaagtcttagaagaagatgaaaatattactgaagaagaaatcaaagctgctatccgtaaaggtgtattagctgttgaattattcccagtattatgtggttctgcatacaaagacaaaggtgttcaatgtatgttagacgctgttattgatttcttaccagctccaactgatgttccatctattaaaggtgaagacgaagacggaaatgaagtagtaagacatccaagtgatgatgaaccattcgcagcattagcattcaaaatcatggctgacccattcgtaggaaaattaactttcttccgtgtgtattcaggacatgttgcatctgggtcttatatattaaactctacaaaagacaaaaaagaacgtttaggacgtatcttacaaatgcatgctaatactcgtaaggaaattgatgaagtttatgctggagatatcgctgctgctgttgggtttaaaaacacaacaactggagatactatctgtgatgaaaagaatttcattatcttagaaaaaatggaattccctgaaccagttatcgaattagctattgaaccaaaaactaaacaagatcaagataaattaagtaatggtttatcaagattagctgaagaagatccaacattcagagttacaacaaaccctgaaactggtgatactattattgctggggttggtgaattacacttagacgttatcgtagatcgtttaaagagagaattcaaagttgaagcaaatgttggtgcaccacaagttgcttacagagaaacaattagacaagctgctgattgtgaaggtaagttcgtaagacaatcaggtggtcgtggacaatacggtcacgtatggattaaattcgaacctaatgaaggtaaaggatttgaattcgttgatgcagttgttggtggaacagtaccaagagaatatatcggttctgtaaaagcaggtcttgaagatgctttacaaaacggtatgattgctggatatccagtattagatatcaaagcaactttatttgatggttcttaccatgatgtcgattcatcagaaatggcatacaaagttgcagcaagcttagctttaaaagcagctggtaaaaaatgtgatccagttatcttagaaccaatcatggctgttgaaatcactgcaccttctgaatatttaggaagtgttatgggtgatatttcatcaagacgtggtatgattgaaggacaagaagaaagaggaaatgctgttactgtacaagcaagtgtacctttatctgaaatgtttggatatgttactgatttaagatcatttacacaaggtcgtggaaactacactatgcaatttgatcgttatgaaccagtaccaaaatcaattaaagaagaaattattaagaaaaatggtggaaacaattaattctgctgaaagttattgcatttttgttacaaatcatttagaatgtatatgtaaaaatttaaagaaatttatataggaggaagctaataatggctaaagaaaaatttgaccgctctaaagcgcatgttaatatcggaactattggtcacgttgaccatggtaaaactactttaactgcagctatcactacagtattatctaaagatggacaagctcaagcaatggattatgctgctatcgatgctgctccagaagaaaaagaacgtggaatcacaatcaacactgcacacgttgagtatcaaactgctactcgtcactatgcacacgttgactgtccaggccatgcagactacatcaaaaacatgatcactggtgctgcacaaatggatggtgctatcttagtagttgctgctacagatggtcctatgccacaaactagagaacatatcttattatctcgtcaagtaggtgtaccttacatcatcgtattcttaaataaatgcgatatggttgatgatgatgaattaatcgaattagttgaaatggaagttcgtgaattattaaatgaatatgacttcccaggtgatgatactccaatcatccgtggatcagctttaaaagcattagaaggagatccaaaatgggttccagctattcatgaattaatggatgctgtagattcttatatcccaactccaactcgtgatactgataaaccattcttaatgccagttgaagacgtatttacaatcactggacgtggaacagttgctacaggacgtgttgaaagaggacaattaaaattaaacgatgaattagaaatcgttggtatccgtgaaactcaaaaaacagttgctacaggtatcgaaatgttccgtaaattattagattacgctgaagcaggagataacgtaggtgtattattaagaggtatcaacagagaagaaatccaacgtggacaagtattagctaaaccaggttcagtacatccacacaaaaaattcaaatctcaagtttatatcttatcaaaagatgaaggtggacgtcatactcctttcttcgctaactacagacctcaattctatttcagaactactgacgtaactggagttatcgaattaccagaaggtgtagaaatggttatgcctggagataacgttgaattaacagttgaattaatcgctccaatcgctatcgaaaacggaactaaattctcaatccgtgaaggtggtagaacagttggtgctggtaacgtttcagaagttatcgaataatcaattgaacgataaaggtgtcatgtgacacctttttttctatgtaaaaaagataatgaaatgcgataaattgtggtagaataaaatacatggaggtatgtttatggaacaattgtatttttttgatatagatggaacattgatagaatgtaataaaggaatatattcaatacctgattcttcacgtaatgctttgttacaattacaaaaacaaggtgatcatgtctttttggctactggtagatgtaagtgttttattattgatggtgttatggattatccttttgatggttatgtgacttgcaatggggcatatgttgaatatatgggtgaaacaatttataaaaaagttatccctgctcaagcaatacaaaaaacacatgaattatgtttagagagggacttagcttattattttgagggtaatgattatatttatgttctcaataaaaataatcctaaacacattgaatttaagaataattgggggatgaaagataatacaataattgatcaatttgaccctcaagaaattgaaacatatattggaatgatagttgtcaattcatcagatgatatagccccaatggtggagactttatcaccatattttgatattcaaagacatcaaagtggttattcatttgacttaactctcaaaggtgaatctaaggctaaaggaataaagaaattagttgaaaaactagggatggacattgaacaaacgattgcctttggcgatggtcgaaacgacgttgagatgcttacagaagttggcttaggtattgcgatgggaaatggagcaatagaagcaaaagctgtagctgattatgtgacagatgatattgataaagatggaattttgaaagcacttaaccatttttctttaattaaatgatttttaagtgttaatggttgaaattgtaacgttaatttgttagaatagaagtacagattaaatctgaaaattgcttatcaaaggagaaattaaaatggatgaacaagaacaaatcgtaattaaccttatcgttaatagtggtagtgcacgtagctctgcaattgaagcaatccaatatgctaaagctggagatttagataaggctgacgaatcattacaaacagcaaaagaaacagtaaatgaagcacatcatgctcaaactgaattaattcaagcagaaattagaggagaaaaagctccattaaacttattaatggtacatgctcaagaccatttaatgactgcattagttgttattgacttagctcaagaatttattgatttatataaaaaaatcggttaattaaaagacaacaaatattaaggaggggttcatgatgaattcttccttttttatattttaaaaagcaaaaataaatttaaaaaaatataaaaaatatgttgactttattctaaaaatagtatagactatagaagtcggctcgagagagatatgacaagcaaacggacattgaaaactaaacagaaaacacgtcaataagaagaaacaaagaagagctagaagacagaagttgtctttagagatagacaatggagagtttgatcctggctcaggatgaacgctggcggcgtgcctaatacatgcaagtcgaacgcaccgcttcggtggtgagtggcgaacgggtgagtaatacataagtaacctggcctttcgagggggataactattggaaacgatagctaagaccgcataggcataattctcgcatgagagttatgttaaatatcctatgggatagcgagaggatggacttatggcgcattagctagttggtgagggtaacggcccaccaaggcgacgatgcgtagccgacctgagagggtggacggccacactgggactgagacacggcccagactcctacgggaggcagcagtagggaattttcggcaatgggcgaaagcctgaccgagcaacgccgcgtgagggaggaagtatttcggtatgtaaacctctgttataaaggaagaacggcgcatgtagggaatgacatgcgagtgacggtactttatgagaaagccacggctaactacgtgccagcagccgcggtaatacgtaggtggcgagcgttatccggaatcattgggcgtaaagagggagcaggcggcaactagggtctgcggtaaaagaccgaagctaaacttcggtaagccgtggaaaccgaggagctagagtgcagtagaggatcgtggaattccatgtgtagcggtgaaatgcgtagatatatggaggaacaccagtggcgaaggcgacgatctgggctgcaactgacgctcagtcccgaaagcgtggggagcaaataggattagataccctagtagtccacgccgtaaacgatgagtactaagtgttgggggtcagacctcagtgctgcagttaacgcaataagtactccgcctgagtagtacgttcgcaagaatgaaactcaaaggaattgacgggggcccgcacaagcggtggagcatgtggtttaattcgaagcaacgcgaagaaccttaccaggtcttgacatacccttaaaggctctagagatagagagatagctataggggatacaggtggtgcatggttgtcgtcagctcgtgtcgtgagatgttgggttaagtcccgcaacgagcgcaacccctgttgccagttgccagcattaagttggggactctggcgagactgcctctgcaaggaggaggaaggcggggatgacgtcaaatcatcatgccccttatgacctgggctacacacgtgctacaatggacggatcagagggaagcgaagccgcgaggtggagcgaaacccagaaacccgttctcagttcggactgcagtctgcaactcgactgcacgaagttggaatcgctagtaatcgcgaatcagcatgtcgcggtgaatacgttctcgggccttgtacacaccgcccgtcacaccatgagagttggtaacacccgaagccggtggcctaaccgcaaggaaggagctgtctaaggtgggactgatgattggggtgaagtcgtaacaaggtatccctacgggaacgtggggatggatcacctcctttctaaggagaagaagcgtggaattctgtttagttttgaatgtctgagaggacattcgagagaagtaggaacattgaaaactgaatagcaaactagcaaaaactttttacaagaagaagatagatgaagaagaaacgagatcaggagtgattgaaggtcaattcatctagttgcaaaaaactaagaaaaaacgagaaaaaagtatagaacttgaacactttaggctaagcaagaaagagcgtatggcggatgcctaggcactaagaggcgaagaaggacgcagcgaacggcgaaacgcgacggcgagcagtaagcaggcaacgacccgtcgatgtccgaatgggggaacccatcattccgagagggatgatatcgtctgatgaataaatagtcagacgaggcgagacgcagggaactgaaacatctcagtacctgcaggagaagaaagtaagaacgattccgtgagtagcggcgagcgaaagcggaggagcccaaaccatcgtaaagatggggttatagggctgccaataaagtcgacttgacatgataggagaagcgcaggggaaggcgcagcgaagagggtgacactcccgtatccgaaatcgtggagagaggcgaggcagtacctgagtacgtcggggcacgtgaaatcctgacggaattatcgaggaccatctcgaaaggctaaatactccttagtgaccgatagcgaaccagtaccgtgagggaaaggtgaaaagaaccccgggaggggagtgaaagagaacctgaaaccatatgcttacaagaagtcagagcccgttaaagggtgatggcgtgccttttgtagaatgagccggcgagttatgatatggagcgaggttaagcgggagacgcggagccgaagcgaaagcgagtcttaatagggcgacagttgcatgtcatagacccgaaaccgggtgatctagccatgatcaggttgaagttggggtaaaacccgatggaggaccgaaccgacccccgttgaaacgttggcggatgaattgtggctaggggtgaaattccaaacgaacccggagatagctggttctccccgaaatagctttagggctagcgtcgcgcgaagtcacgtgaaggtagagcactgaatatgtgatggcctcatcccgaggtactgagcataatcaaactccgaatgtcacgaggacatgcgcggcagtcagactgcgggtgataaggtccgtagtcaagagggaaacagcccagaccatcagctaaggtcccaaaatatatgctaagtggaaaaggatgtggagatgtccagacaaccaggaggttggctcagaagcagccaccctttaaagagtgcgtaacagctcactggtcgaatgactctgcgccgaaaatttaccggggctaagcataataccgaagctatggatttatagagaatataagtggtaggggagcgttccagtcagcgaggaagcatgatcgtaaggacatgtggagcggctggaagagagaatgccggtgtgagtagcggcacgtgggtgagaatcccacgcaccgaagacccaaggtttccagaggaaggttcgtccgctctgggtaagtcgggacctaaggcgaggccgagaggcgtagtcgatggacaacgggtggatattcccgtacctggcgtgagggcgatggagtgacggagaaggctaggcgatccagctgctggaatagctggtgcaagcgaggtaggggacatccaggcaaatccggatgtcataacccgaaggcgtgaagcgtatggaacattacgataagtacagaagtcgccgaagccatcttccaagaaaagcttctagcgatacctcaagtcagcccgtaccgaaaatggacacacatgggtgaggagagaatcctaaggtgagcgagagaactatagctaaggaactctgcaaaatgactccgtaacttcgggagaaggagtgctcagtgaaagctgagccgcagtaaaacggcccaagcgactgtttaccaaaaacacagctctctgccaagacgcaagtcgaagtatagggggtgacgcctgcccggtgctggaaggttaagaggagtggtcagtcttaaggcgaagccatgaattgaagccccagtaaacggcggccgtaactataacggtcctaaggtagcgaaattccttgtcaggtaagttctgacccgcacgaaaggcgtaacgatttgggcgctgtctcagctgtagactcggtgaagtcttagtacctgtgaagatgcaggttacccgcgactagacggaaagaccccatggagctttactgtagcttgatattggattttgatgcatgatgtacaggataggtaggagactgggagacggatacgccagtattcgaggagtcgacgttgggatactacccttgatgcattgaagttctaaccggacgtcgtgaagccgatgacgggacagtgtcaggtgggcagtttgactggggcggtcgcctcctaaagagtaacggaggcgcccaaagataccctcagcatggttggaaatcatgcgcagagtgcaaaggcagaagggtgtttgactgcgagacatacaggtcgagcagggacgaaagtcgggcttagtgatccggcggtgccgaatggaagggccgtcgctcaacggataaaagctaccctggggataacaggctgatctcccccaagagttcacatcgacggggaggtttggcacctcgatgtcggctcatcgcatcctggagctgaagtcggttccaagggttgggctgttcgcccattaaagcggtacgcgagctgggttcagaacgtcgtgagacagttcggtccctatctgtcgtgggcgtaggaagtttgaggagagctgccctcagtacgagaggaccggggtggacagaccaatggtgcaccagttgtcacgccagtggcacagctgggtagctaagtctggaagggataaacgctgaaggcatctaagcgtgaagccccctccaagatgagacttcccatttcgaaggaaagtaagacccctctaagacgaagaggttgataggtcaggggtgtaagcatggcgacatgctgagctgactgatactaataggtcgagggcttaacctaagaaggtcgttcaaggagagagaagctagttactgttcagttttgagcgttcgtgctcgcaagagatctggtggcgatagcatgatggaaacacctgtacccatgccgaacacagaagttaagcatcataacggcgaagatagtgagcgattgcgacaatagcaagctgccagttctcctgagggatatcatccgatatctctctttttttgtatggacaggcattgcctagatctgccctgtcttcccgcctgctgcacataagaggagagaggcaaagagacgagagggggattcggcagtcatcttccgggcacatcagtcatcagcggagacgtcggatattgggcataagcgagctgactcatcaatccgaaagaaaaatcaataaaaaaatcaattcaaaaaactgcgatggaatcagcgtttttcaatgaatcgataaaaaagtgcaaaaaaagtaaaaaaaagacttgcaaagggagggatgagatggtattatagatgagcactcggcaagagggcagcaaacggacattgaaaactaaacagaaaacacgtcaataagaagaaacaaagaagagctagaagacagaagttgtctttagagatagacaatggagagtttgatcctggctcaggatgaacgctggcggcgtgcctaatacatgcaagtcgaacgcaccgcttcggtggtgagtggcgaacgggtgagtaatacataagtaacctggcctttcgagggggataactattggaaacgatagctaagaccgcataggcataattctcgcatgagagttatgttaaatatcctatgggatagcgagaggatggacttatggcgcattagctagttggtgagggtaacggcccaccaaggcgacgatgcgtagccgacctgagagggtggacggccacactgggactgagacacggcccagactcctacgggaggcagcagtagggaattttcggcaatgggcgaaagcctgaccgagcaacgccgcgtgagggaggaagtatttcggtatgtaaacctctgttataaaggaagaacggcgcatgtagggaatgacatgcgagtgacggtactttatgagaaagccacggctaactacgtgccagcagccgcggtaatacgtaggtggcgagcgttatccggaatcattgggcgtaaagagggagcaggcggcaactagggtctgcggtaaaagaccgaagctaaacttcggtaagccgtggaaaccgaggagctagagtgcagtagaggatcgtggaattccatgtgtagcggtgaaatgcgtagatatatggaggaacaccagtggcgaaggcgacgatctgggctgcaactgacgctcagtcccgaaagcgtggggagcaaataggattagataccctagtagtccacgccgtaaacgatgagtactaagtgttgggggtcagacctcagtgctgcagttaacgcaataagtactccgcctgagtagtacgttcgcaagaatgaaactcaaaggaattgacgggggcccgcacaagcggtggagcatgtggtttaattcgaagcaacgcgaagaaccttaccaggtcttgacatacccttaaaggctctagagatagagagatagctataggggatacaggtggtgcatggttgtcgtcagctcgtgtcgtgagatgttgggttaagtcccgcaacgagcgcaacccctgttgccagttgccagcattaagttggggactctggcgagactgcctctgcaaggaggaggaaggcggggatgacgtcaaatcatcatgccccttatgacctgggctacacacgtgctacaatggacggatcagagggaagcgaagccgcgaggtggagcgaaacccagaaacccgttctcagttcggactgcagtctgcaactcgactgcacgaagttggaatcgctagtaatcgcgaatcagcatgtcgcggtgaatacgttctcgggccttgtacacaccgcccgtcacaccatgagagttggtaacacccgaagccggtggcctaaccgcaaggaaggagctgtctaaggtgggactgatgattggggtgaagtcgtaacaaggtatccctacgggaacgtggggatggatcacctcctttctaaggagaagaagcgtggaattctgtttagttttgaatgtctgagaggacattcgagagaagtaggaacattgaaaactgaatagcaaactagcaaaaactttttacaagaagaagatagatgaagaagaaacgagatcaggagtgattgaaggtcaattcatctagttgcaaaaaactaagaaaaaacgagaaaaaagtatagaacttgaacactttaggctaagcaagaaagagcgtatggcggatgcctaggcactaagaggcgaagaaggacgcagcgaacggcgaaacgcgacggcgagcagtaagcaggcaacgacccgtcgatgtccgaatgggggaacccatcattccgagagggatgatatcgtctgatgaataaatagtcagacgaggcgagacgcagggaactgaaacatctcagtacctgcaggagaagaaagtaagaacgattccgtgagtagcggcgagcgaaagcggaggagcccaaaccatcgtaaagatggggttatagggctgccaataaagtcgacttgacatgataggagaagcgcaggggaaggcgcagcgaagagggtgacactcccgtatccgaaatcgtggagagaggcgaggcagtacctgagtacgtcggggcacgtgaaatcctgacggaattatcgaggaccatctcgaaaggctaaatactccttagtgaccgatagcgaaccagtaccgtgagggaaaggtgaaaagaaccccgggaggggagtgaaagagaacctgaaaccatatgcttacaagaagtcagagcccgttaaagggtgatggcgtgccttttgtagaatgagccggcgagttatgatatggagcgaggttaagcgggagacgcggagccgaagcgaaagcgagtcttaatagggcgacagttgcatgtcatagacccgaaaccgggtgatctagccatgatcaggttgaagttggggtaaaacccgatggaggaccgaaccgacccccgttgaaacgttggcggatgaattgtggctaggggtgaaattccaaacgaacccggagatagctggttctccccgaaatagctttagggctagcgtcgcgcgaagtcacgtgaaggtagagcactgaatatgtgatggcctcatcccgaggtactgagcataatcaaactccgaatgtcacgaggacatgcgcggcagtcagactgcgggtgataaggtccgtagtcaagagggaaacagcccagaccatcagctaaggtcccaaaatatatgctaagtggaaaaggatgtggagatgtccagacaaccaggaggttggctcagaagcagccaccctttaaagagtgcgtaacagctcactggtcgaatgactctgcgccgaaaatttaccggggctaagcataataccgaagctatggatttatagagaatataagtggtaggggagcgttccagtcagcgaggaagcatgatcgtaaggacatgtggagcggctggaagagagaatgccggtgtgagtagcggcacgtgggtgagaatcccacgcaccgaagacccaaggtttccagaggaaggttcgtccgctctgggtaagtcgggacctaaggcgaggccgagaggcgtagtcgatggacaacgggtggatattcccgtacctggcgtgagggcgatggagtgacggagaaggctaggcgatccagctgctggaatagctggtgcaagcgaggtaggggacatccaggcaaatccggatgtcataacccgaaggcgtgaagcgtatggaacattacgataagtacagaagtcgccgaagccatcttccaagaaaagcttctagcgatacctcaagtcagcccgtaccgaaaatggacacacatgggtgaggagagaatcctaaggtgagcgagagaactatagctaaggaactctgcaaaatgactccgtaacttcgggagaaggagtgctcagtgaaagctgagccgcagtaaaacggcccaagcgactgtttaccaaaaacacagctctctgccaagacgcaagtcgaagtatagggggtgacgcctgcccggtgctggaaggttaagaggagtggtcagtcttaaggcgaagccatgaattgaagccccagtaaacggcggccgtaactataacggtcctaaggtagcgaaattccttgtcaggtaagttctgacccgcacgaaaggcgtaacgatttgggcgctgtctcagctgtagactcggtgaagtcttagtacctgtgaagatgcaggttacccgcgactagacggaaagaccccatggagctttactgtagcttgatattggattttgatgcatgatgtacaggataggtaggagactgggagacggatacgccagtattcgaggagtcgacgttgggatactacccttgatgcattgaagttctaaccggacgtcgtgaagccgatgacgggacagtgtcaggtgggcagtttgactggggcggtcgcctcctaaagagtaacggaggcgcccaaagataccctcagcatggttggaaatcatgcgcagagtgcaaaggcagaagggtgtttgactgcgagacatacaggtcgagcagggacgaaagtcgggcttagtgatccggcggtgccgaatggaagggccgtcgctcaacggataaaagctaccctggggataacaggctgatctcccccaagagttcacatcgacggggaggtttggcacctcgatgtcggctcatcgcatcctggagctgaagtcggttccaagggttgggctgttcgcccattaaagcggtacgcgagctgggttcagaacgtcgtgagacagttcggtccctatctgtcgtgggcgtaggaagtttgaggagagctgccctcagtacgagaggaccggggtggacagaccaatggtgcaccagttgtcacgccagtggcacagctgggtagctaagtctggaagggataaacgctgaaggcatctaagcgtgaagccccctccaagatgagacttcccatttcgaaggaaagtaagacccctctaagacgaagaggttgataggtcaggggtgtaagcatggcgacatgctgagctgactgatactaataggtcgagggcttaacctaagaaggtcgttcaaggagagagaagctagttactgttcagttttgagcgttcgtgctcgcaagagatctggtggcgatagcatgatggaaacacctgtacccatgccgaacacagaagttaagcatcataacggcgaagatagtgagcgattgcgacaatagcaagctgccagttctcctgagggatatcatccgatatctctctttttttgtatggacaggcattgcctagatctgccctgtcttcccgcctgctgcacataagaggagagaggcaaagagacgagagggggattcggcagtcatcttccgggcacatcagtcatcagcggagacgtcggatattgggcataagcgagctgactcatcaatccgaaagaaaaatcaataaaaaaatcaattcaaaaaactgcgatggaatcagcgtttttcaatgaatcgataaaaaagtgcaaaaaaagtaaaaaaaagacttgcaaagggagggatgagatggtattatagatgagcactcggcaagagggcagcaaacggacattgaaaactaaacagaaaacacgtcaataagaagaaacaaagaagagctagaagacagaagttgtctttagagatagacaatggagagtttgatcctggctcaggatgaacgctggcggcgtgcctaatacatgcaagtcgaacgcaccgcttcggtggtgagtggcgaacgggtgagtaatacataagtaacctggcctttcgagggggataactattggaaacgatagctaagaccgcataggcataattctcgcatgagagttatgttaaatatcctatgggatagcgagaggatggacttatggcgcattagctagttggtgagggtaacggcccaccaaggcgacgatgcgtagccgacctgagagggtggacggccacactgggactgagacacggcccagactcctacgggaggcagcagtagggaattttcggcaatgggcgaaagcctgaccgagcaacgccgcgtgagggaggaagtatttcggtatgtaaacctctgttataaaggaagaacggcgcatgtagggaatgacatgcgagtgacggtactttatgagaaagccacggctaactacgtgccagcagccgcggtaatacgtaggtggcgagcgttatccggaatcattgggcgtaaagagggagcaggcggcaactagggtctgcggtaaaagaccgaagctaaacttcggtaagccgtggaaaccgaggagctagagtgcagtagaggatcgtggaattccatgtgtagcggtgaaatgcgtagatatatggaggaacaccagtggcgaaggcgacgatctgggctgcaactgacgctcagtcccgaaagcgtggggagcaaataggattagataccctagtagtccacgccgtaaacgatgagtactaagtgttgggggtcagacctcagtgctgcagttaacgcaataagtactccgcctgagtagtacgttcgcaagaatgaaactcaaaggaattgacgggggcccgcacaagcggtggagcatgtggtttaattcgaagcaacgcgaagaaccttaccaggtcttgacatacccttaaaggctctagagatagagagatagctataggggatacaggtggtgcatggttgtcgtcagctcgtgtcgtgagatgttgggttaagtcccgcaacgagcgcaacccctgttgccagttgccagcattaagttggggactctggcgagactgcctctgcaaggaggaggaaggcggggatgacgtcaaatcatcatgccccttatgacctgggctacacacgtgctacaatggacggatcagagggaagcgaagccgcgaggtggagcgaaacccagaaacccgttctcagttcggactgcagtctgcaactcgactgcacgaagttggaatcgctagtaatcgcgaatcagcatgtcgcggtgaatacgttctcgggccttgtacacaccgcccgtcacaccatgagagttggtaacacccgaagccggtggcctaaccgcaaggaaggagctgtctaaggtgggactgatgattggggtgaagtcgtaacaaggtatccctacgggaacgtggggatggatcacctcctttctaaggagaagaagcgtggaattctgtttagttttgaatgtctgagaggacattcgagagaagtaggaacattgaaaactgaatagcaaactagcaaaaactttttacaagaagaagatagatgaagaagaaacgagatcaggagtgattgaaggtcaattcatctagttgcaaaaaactaagaaaaaacgagaaaaaagtatagaacttgaacactttaggctaagcaagaaagagcgtatggcggatgcctaggcactaagaggcgaagaaggacgcagcgaacggcgaaacgcgacggcgagcagtaagcaggcaacgacccgtcgatgtccgaatgggggaacccatcattccgagagggatgatatcgtctgatgaataaatagtcagacgaggcgagacgcagggaactgaaacatctcagtacctgcaggagaagaaagtaagaacgattccgtgagtagcggcgagcgaaagcggaggagcccaaaccatcgtaaagatggggttatagggctgccaataaagtcgacttgacatgataggagaagcgcaggggaaggcgcagcgaagagggtgacactcccgtatccgaaatcgtggagagaggcgaggcagtacctgagtacgtcggggcacgtgaaatcctgacggaattatcgaggaccatctcgaaaggctaaatactccttagtgaccgatagcgaaccagtaccgtgagggaaaggtgaaaagaaccccgggaggggagtgaaagagaacctgaaaccatatgcttacaagaagtcagagcccgttaaagggtgatggcgtgccttttgtagaatgagccggcgagttatgatatggagcgaggttaagcgggagacgcggagccgaagcgaaagcgagtcttaatagggcgacagttgcatgtcatagacccgaaaccgggtgatctagccatgatcaggttgaagttggggtaaaacccgatggaggaccgaaccgacccccgttgaaacgttggcggatgaattgtggctaggggtgaaattccaaacgaacccggagatagctggttctccccgaaatagctttagggctagcgtcgcgcgaagtcacgtgaaggtagagcactgaatatgtgatggcctcatcccgaggtactgagcataatcaaactccgaatgtcacgaggacatgcgcggcagtcagactgcgggtgataaggtccgtagtcaagagggaaacagcccagaccatcagctaaggtcccaaaatatatgctaagtggaaaaggatgtggagatgtccagacaaccaggaggttggctcagaagcagccaccctttaaagagtgcgtaacagctcactggtcgaatgactctgcgccgaaaatttaccggggctaagcataataccgaagctatggatttatagagaatataagtggtaggggagcgttccagtcagcgaggaagcatgatcgtaaggacatgtggagcggctggaagagagaatgccggtgtgagtagcggcacgtgggtgagaatcccacgcaccgaagacccaaggtttccagaggaaggttcgtccgctctgggtaagtcgggacctaaggcgaggccgagaggcgtagtcgatggacaacgggtggatattcccgtacctggcgtgagggcgatggagtgacggagaaggctaggcgatccagctgctggaatagctggtgcaagcgaggtaggggacatccaggcaaatccggatgtcataacccgaaggcgtgaagcgtatggaacattacgataagtacagaagtcgccgaagccatcttccaagaaaagcttctagcgatacctcaagtcagcccgtaccgaaaatggacacacatgggtgaggagagaatcctaaggtgagcgagagaactatagctaaggaactctgcaaaatgactccgtaacttcgggagaaggagtgctcagtgaaagctgagccgcagtaaaacggcccaagcgactgtttaccaaaaacacagctctctgccaagacgcaagtcgaagtatagggggtgacgcctgcccggtgctggaaggttaagaggagtggtcagtcttaaggcgaagccatgaattgaagccccagtaaacggcggccgtaactataacggtcctaaggtagcgaaattccttgtcaggtaagttctgacccgcacgaaaggcgtaacgatttgggcgctgtctcagctgtagactcggtgaagtcttagtacctgtgaagatgcaggttacccgcgactagacggaaagaccccatggagctttactgtagcttgatattggattttgatgcatgatgtacaggataggtaggagactgggagacggatacgccagtattcgaggagtcgacgttgggatactacccttgatgcattgaagttctaaccggacgtcgtgaagccgatgacgggacagtgtcaggtgggcagtttgactggggcggtcgcctcctaaagagtaacggaggcgcccaaagataccctcagcatggttggaaatcatgcgcagagtgcaaaggcagaagggtgtttgactgcgagacatacaggtcgagcagggacgaaagtcgggcttagtgatccggcggtgccgaatggaagggccgtcgctcaacggataaaagctaccctggggataacaggctgatctcccccaagagttcacatcgacggggaggtttggcacctcgatgtcggctcatcgcatcctggagctgaagtcggttccaagggttgggctgttcgcccattaaagcggtacgcgagctgggttcagaacgtcgtgagacagttcggtccctatctgtcgtgggcgtaggaagtttgaggagagctgccctcagtacgagaggaccggggtggacagaccaatggtgcaccagttgtcacgccagtggcacagctgggtagctaagtctggaagggataaacgctgaaggcatctaagcgtgaagccccctccaagatgagacttcccatttcgaaggaaagtaagacccctctaagacgaagaggttgataggtcaggggtgtaagcatggcgacatgctgagctgactgatactaataggtcgagggcttaacctaagaaggtcgttcaaggagagagaagctagttactgttcagttttgagcgttcgtgctcgcaagagatctggtggcgatagcatgatggaaacacctgtacccatgccgaacacagaagttaagcatcataacggcgaagatagtgagcgattgcgacaatagcaagctgccagttctcctgagggatatcatccgatatctctctttttttgtctaaaaaaatgaaaccattctcattttgtgaattcataaagtatttaatctgattatcgtaattgtattattttttatttgtaaaacaatcagttagatctacatcatatattatataaacaattaatggacaagtatctaaatagatatcttagatataactctattaattaattcttattctaaaatagaatgagtaaaaagataaatttataattttattacatttgagtaattatacctaaaatagaaattacatgattaaaatttttggattatatttaaatataattaatctatttattttaatctaaactctttaagaaaatccataatagtatctagaaaataacggaagtgtaataatgtaaagatttctttatttttataacaaattaaatttcttatgtgataaaacttcttttaactgaacttagcaattaaaaatataaatgaaatataaacatattattttgataaatctaggagatttattatggattttacgtattattcatcattaagatgtttaattatgatttttaagatatttattatgagtaaaccaaaaacaaactaaaattgagagaatatatttgtctaataaattctggtcaaatgaaaaagtaaattccactttgtaagagtaagttctactcttacaaaaagaatggaatttaattactacaaataagtgttagaatcattgattttaatactttttttagtataatgaaactgtaatttgatgatatctctctattttttgggtatacgaaagggaaaggtcaaatctgaattttttttgaaattcaaaattccatctctcaagattagtacttacgtttagtggatattctaattacctatgtttatttttattttgatattaatgactgagataaattaatatcatcaggttctatacatgagataccaaagatatttgcgatatctttgccatataacatactaaacaataaaagtggtgatttatcatttagtttctctcgtgcatatgaatcaatatgggacatcattaaattgatgtctttttgattatatggattccatgaatgcccttggggtacaattcttctaagaaattcatgagtgacttcgcatgaacctttttcattgggagaagaagggtgacaatagaagacataagttcttctttcaccatcttcatcaaattcaatggcttcaggatttgagaactcagatccattatctgtcaatatcactggaaataatctcatgaataattttcttcccagcttgtggtagatgtcgttgaagaaatcagtaacactttttgaatcattaaactcacgcttaatcgctatcatgaatgagcagacaacaaagtgaatggttaacagacaagattcacctttcacgccttcgacagtatccatttcaacaagagctatatctggatgtttcttcataaacagtagaaagtcctcatatcttcttccttcaagacaatgcttgtcaactttgtaataagttgatttttttcttctaggacgatatcatgatataccttgtacgattaaattccactataaaatttgaaagattaagttcaacccttaatttataaaaggtggaatttagttttacaattgaagtctaataaattctttaaaaaaaatcaaaaaaaatgcaaaaagtgcttgatttatcattgtttttagtgtaaaatgcacttgttgtgaaatgcgaagaagtgcgaggttgctgaaacgctgatagccgttgtcatgagcggaagggtggattcaggtaattcgtgcggagcggccaaaaaattggcaaacagaaggaggaataattcatggcaaacaacaaaattagaatcagattgaaatcatttgatcacaaaatcttagatgcttctgctgaaaagattgtagcagctgctaaaaaatcaggtgctcaagtagttggtccagtaccattacctactgaaaaagaaatttatactatcttaagagcagttcataagtataaagattctcgtgaacaatttgaaatcagaactcacaaacgtctaattgacattgtgaatccaacaccagaaacagttgatgtattaactcgtttagaattaccaagtggtgtggatatcgaaattaaattataaggaaaggttaaggtgtaactcatgaaaggaatcttaggtcgtaagattggaatgactcaagttttcactactgacggaagattaatcccagttactgttgtagaagcagctccaaacgttgttttacaaaagaaaacagttgctactgatggatatgatgcaatccaagttggttttgaagataagagagaaaaattagcaacaaaagctcacaaaggacatgttgcaaaagctgaaacagctcctaagcgcttcattaaagaatttcgttatgacgaaatgatgagttatgaagttggtcaagaaattaaagttgatagctttgtagctggtgaagttgtagatgtaacaggaactagcaaaggtaaaggttatcaaggtgttataaaaagacataatcaacacattggtcctaaaggacatggttcaggtgctcacagaatcgttggttcaatgggtcctatcgctcctaacagaattgctccaggtaagaaattaccaggtcaaatggggaacgtaacaagaacagttcaaaacttagaaatcattgctgttgatgttgaaaacaatgtattattaatcagcggatcaatccctggtcctaaaaaaggattagttgttgttaaatctgctgttaaaggaaatggtaaggttaaccctgctgaagatttaattatttatgaaacagaagaagaaatcgtagaaagcccagtagtagaagaaactgctgaagctgctgaataatgaagcgaaaggaggaaaactaatgttaaaagttgcagtatataaccaagaaggaacaaaagttaaagatacagaattaaacgaatctgtatttggtattgaaccaaacaatcaagcaatctttgatatggtcttactacaaagagcttcatggagacaaggaactcataaagttaaaaaccgtactgaagtcaaaggtggaggaaagaaaccttggagacaaaaaggtacaggtagagctagacaaggatctatccgtgctcctcaatggagaggtggaggagttgtatttggaccaacacctgatagaaactacaagctaaaaatgaacagaaaagtaagacgtttagcattaaaatcagctttaagtcaaaaagttatcgacagcgaattaactgtattagatacaatcgcattcgatgcaccaaaaactaaagctatggtaaaagtattagaaagcttagaagctaacagaaaaacattaatcgttatggacgaagttaatgaaaacgttgctttatctgcaagaaatattcctggagttaaagttatcgattcaaaaggacttaacgtatatgatatcttagatagcactaagttagtcatgacagaaggagctatcaaagctgttgaggaggtattggcataatggcacatattacagatgttttaaagaaaccagtacttactgaaaaatctttattgttacaacaaaacgaaaacaaatatacattcgatgtagatgtaactgctaataaaattgaagtaaaacaagcagttgaaaaaatgtttgacgttaaagttgaaagtgtaaacattatgaatgtgaaacctaaaacaaaaagaatgggtagatacgttggtaaaacaagcaaaagaagaaaagctattgttaaattaaaagaaggatatgaaattaacttattcggagaagaataaaatttcaaactattggaatgaactccattccagataagaaaaataaggaggaacaaagatgcctattaaagcatataagcctacgacaaacggtcgtcgtaatatgactactttgacttatgaagaaattacaactaataagcctgagaaatcattaacaatccgtttatctaaaacaggtggacgtaataatcatggtgttatcactactcgtcatcacggtggtggacataagcgtttatatcgtattatcgatttcaaacgtaataaagatgatgttgttggaaaagttgcaacaatcgaatatgatccaaatagatcagcaaacatcgcattaattaattatgcagatggtgaaaaaagatatattcttgctcctaaaggattagaagtaggaatgagcattgtatcaggtgaaaacgctgatattatcgtaggtaactgcttaccaatgggaaatatgcctgaaggtacagttatccacaacattgaaatgcaacctggtaaaggtggacaaatcgctagatctgctggtgtgtctgctcaaatcttaggtaaagaaggaaaatacgtaactgtaagattagcttctggagaagttagaaaattcttagctgtttgtagagcaacagttggtgttgttggaaacgaagactatggattagttaactatggtaaagctggtcgtaacagatggagaggtattagacctacagttcgtggttctgttatgaaccctaatgatcaccctcatggtggtggtgaaggtagaacttcaatcggacgtaaagctccaatgactccttggggtaaaaaagctcttggagttaaaacaagaaatacaaagaaagcttcaaataaattaatcgtacgtcgtcgtaacggtaaataagaaggagggttatagaatatggcaagaagtttaaaaaagggtccattcgtggatgaacatttaatgaaaaaagttgaagcattaaatgctgcaaacaaaaaagaagtcattaaaacatggtcaagacgttctacaatcttcccacaatttattgaacatacgttcgcagtatataacggaagagaacatatcccagtttatgtaactgaagatatggttggacacaaattaggagaattcgctcctacaagaacttatcatggtcatggtgctgatgataaaaagtcaggtaaataagaagagaggagaaaaataacatggaagcaagagctcaagctaaaatgattcgtgtttcgcctcaaaaagcaagattagttgttgacttagtaagaggtaagaacgtaaaagaagcacttggtatcttagaatatgtaaacaaaagtgctactcctgcaatcattaaagtcgttaaatctgctgcacagaacgctgttttcaatgaaggtgcagaagaagataaattatatattaaagaaatttatgtagacgaaggtcctacattaaagagattccgtgcaagagcaaaaggtagcggtactcaaattttaaaaagaacaagccacatcacatgtgtggttgctgaaagataggaggtcaaagcatgggtcaaaaagtaagtccagtaggattacgtgttggcgttaaccgtgattggaattcaagatggtacgctaatgataaagactttgcttcattattacacgaagatatcaagattcgtgaattcttgaatgcaaaattaaaaggcgcttatgtcgctaacattgaaattgaaagatctaaaaatcgtgtgaatatcttcgttcatacatctagacctggtgtagttatcgggaaagatggagaagctgttgatgcgttaagaaaagaagttgctaaattagttaaagataaacaagtgtttatcaatattgttgaaattaaaaatccagacgttgttgctcaacttgttgcaaacaagattgctgaacaattagaaaaccgtgcttcatttagaacagttcaaaaaagagctatccaaagcgctatgagagctggagctaaaggaatcaaaacttgtgtatcaggtcgtttaggtggagctgatatggcaagaactgaaggatattctgaaggaaatgtacctcttcatacattaagagctgacattgactacgctactgcagaagctgacacaacttatggaaaattaggagttaaagtttggatttgtaagggagaaattcttcctgcaaagaagaaaggggataaataatcatgttgatgcctaagagaactaaatatagaagacctcatagaattaaatatgaaggtaaggctaaaggtggaactcaagtttcatttggtgaatatggtttacaagctcaagaaggtgcttggattacttcaagacaaatcgaagcagctcgtatcgctatgaaccgttatatgaaacgtggtgggcaagtttggattagaatcttccctcatttagctaaaacaaagaaacctcttgaagtccgtatgggttcaggtaaaggtgctccagaagaatgggtagcagtagtaaaaacaggtcgtgttatgttcgaagtcgctggtgtagaagaagaagttgcaagagaagctttaagacttgcatctcataaactaccaatcaagtgtaagattattggaagaggtgagtaattgtgacagttcaagatattagaaatacagaaactcaagaattacttaacaaagtagaagagtacaagaaagaattatttggattaagattccaacaagcaacaggtcaattagaaaacactgctcgtattaaaacagtgagaaaaaatattgcaagaattaaaacaattattagagaaagagaattaaacaaataattagaaggagaaaaatatggaaagaaacaatcgtaaagtttatactggaacagttatttctacaaaaatggataagacaatcactgttttagtagaaactcatgttaaacacaaattatacggaaaacgtgttaaatcttctaaaaagtttaaggctcatgatgaagaaaatattgctagaaatggtgacgttgtaaaaattatggcaactcgtccattatcagcaactaaacgtttccgtttagtagaaatcgtaaaaaaagcagaaattatttaatgaaagaatctgaaaggaggtcactcgaatgatccaaaatgaaagcagattgaaagttgctgacaatacaggagcaaaagaagtactagtaattagaaaccttggtggttcaaatagaaaatttagtaacatcggtgatatcgtcgtggctacagtgaaacaagcgactccaggtggtacagttaaaaaaggtgaagtcgtaaaagcagttatcgtaagaactaaatatggtgttaaccgtgaaaatggttcattaattaagtttgatgacaatgcttgtgttatcatcaaagatgacaactcacctaaaggaactcgtatctttggaccggtagcaagagagttaagagatgcagatttcatgaaaatcgtatcattagctcctgaggtattataggaggagacgagaagatgaaattacgtgtaggtgatacagttcaagttatcgctggtagcgataaaggaaaaactggagaaattatccaaattctaagaaaagaagacagagttattgttgaaggtgttaatatggtaacaaaacacattaaaccttcacaagctgatccagaaggtggaattgtaacaagagaagctccaattcatgtttcaaatgttgcatactatgattcaaaagcaaaagaaactgttaagatcggttacgctttcgatgaagaaggtaagaaataccgtatcaacaaaaaaacaggtaaagcattagacaaaactacaaagaagaaaaagtaatcggaaggaggttaaataatgaaccgactaaaggaacgttatgaaaatgaaattagcaagtcattaatgactaaatttaattatagttctgtaatggaagttccagctatggaaaaaattgttatcaacattggtgttggtgatgcagtaagcaactctaaattattagatgaagctgttgaagaattaactttaattgcaggacaaaaaccagtgattactaaagcaaaaaaatcaattgctggattcaaattacgtgaaggaatgccaatcggatgtaaagttacattacgtggtgaaagaatgtatgagttcttagataaattagtaaacatctctttacctcgtgtaagagacttcagaggtgttccaaagaattcatttgatggtagaggaaattatactttaggtgttaaagaacaattaattttccctgaaatcaacttcgataaagtaaacaaattaagaggaatggatatcgtattcgtaacaactgctaaaactgatgaagaaggtcatgaattattagcacaattaggaatgccattccataaataaggaggacttaattaatggctaaaacatcaatgaaagttaaacaacaacgtcctcaaaaatacaaagttcgtgaatatacaagatgcgaacgttgtggacgtccacatgcagtaattagaaaattcaaattatgccgtatttgcttcagagaattagcttacaaaggtgaaattcctggtgtaaaaaaagcaagctggtaatgaaaatataatcccaaatggaaggaggacattgtgaatggtaacagatccaatcgcagatatgttaacaagaattcgtaacgcgaaccaacaacgtcatgaagaagttgttgtcccagcatcaaaattaaaggtacaattagctgaaattttgaaaaacgaaggatttattaaaggatataaagtagaaggcgaaggtgttattaaaaacatcgtcatcactttaaaatataaaggaaatgacagagttatttctggattaaagagagtctctaaacctggacttcgtcaatatgcaaaagtgaacgaaatccctaaggtattaaatggtttaggaatcgttgtattatctacttctcaaggattaatgactgataaagaagcaagagctaaacaaatcggtggagaagtattagcatatatctggtaataaaaaaattaaaacaggaggtgtaactgatgtctcgtgtaggtaataagattatcaatgtacctgaaggtgtgaaagttgaaatcgctgatgacaacactgtaacagtaacaggtgcaaaagggactttagtaagacaattttctccattaatcaaaattgatatggatggaaatgaaattaaagtagtaagaacaagtgaacaaaaaactgtgaaacaattacacggtactacaagagcattacttgcaaacatgattgaaggtgtacacaacggttatgaaaagaacttagaaatcgttggtattggataccgtgctcaaatgcaaggaaataaattagtattaaacgtaggattctctcatccagttgaagttgaaactgaagaaggagttaaagttgaaactcctactcaaacaactattaaagtatctggaatctctaaagaaagagttggagaaatcgctgctagaatcagagctgttaagaaacctgaaccatataaaggaaaaggtattaaatattctgatgaaagaattattagaaaagaaggtaaaactgctggtaagaagtagttaataaataaggaaggagctattaaatcatggctaaaactatgtcaagaaacgatttacgtcaaagacgtcatgccagagttcgtactaaaatcagtggaactcctgaatgtccacgtttaaatgtattccgttcaagctctcatatccatgcccaaatcattgatgatgtaaatggtgtcactttagtggctgcatcttcagtagatatgaaactagcaaatggtggaaatgtagaagctgctacacaagttggtaaagaaattgcgaaaagagctatcgctaaaaatattgaaaatgtagtattcgatcgtggaggatacatctatcatggtcgtgtgaaagcactagctgaagctgctagagaagctggattgaaattctaataggaggttaaagaatggaacaacgtaaaccaagagaaaatgggcctagaagaaacggacctagaaaaaatggacctagaagaaatggacctaaagttgaaaaagaattcgaagaacgtgttgttactattaaccgtgtaactaaagtagttaaaggtggacgtaaattccgctttgctgcattagttgttattggtgatagaaaaggtcgtgttggattcggaactggtaaagctaacgaagtacctgatgctattagaaaagcatctgaagcagctaaaagaaatgtaatcagagtaccaatgattcatggaactattcctcatgaagtaaacggtatgtttggttctggaaatgtattcttaaaacctgcatctcaaggtactggaatcatcgcaggtggtccagttcgtgctgttgttgaattagcaggatattctgatatcttatctaaatcacttggatcaagaactccaatcaacatggttcgtgcaactatggaaggtttagcatcattaaaaactgctcaacaagttgctgaattaagagataaaaaagttgaagaaatttacggataggaggagcgtaagaaatggcaaacgaaaataaagttatcattacgcttgtaaaaagtccaattggtgcgaaaaagaatcaaaaggatactcttaaagcgttaggtttaacaaaaatgaacaagtcagtggaaaaagtcaacaatgaatttattcaaggtatgattaaaactgttggacaccttgttaaagttgaagaaagtaaatagtaggaggtgtaaacatgaagctacacgaattacaatatacagaaggtgcacgtaaagaaagaaaacgtgttggtcgtggaacaagttcaggaactggtaaaactgctggtaaaggacaaaaaggacaaaaagcaagatctggtggaggaaagaaacctggttttgaaggaggtcaaacacctttattcatgcgtttaccaaaacgtggtttcactaacttcaataaagttgaatacgcaatcgttaatgtagaagatttaaacaaattcgaagctggaagtgttgtagatatggctacattaaaagaatgcggattaattaagaaagaattagatggtttaaaagttttaggtaacggtaaattagaagttgctttgactgttaaagctcaaaaattctctaaatctgctgttgctgctatcgaagctgcaggtggaaaaactgaggtgatctaagatgttaagcttttttaagaatgtctttaaaaaaggtgaattacgtcgtagaattatctttacattaggtatgttatttgtattccgtttaggtgctgctattactattccatcaattaatgctggtgcattaactgggaatgctacaaatagtggtatcctcggaattatgaatatgcttggtggtgggatgcttgagagattttcaattttctcattaggagtttctccttatatcacagcatctatcattattgaattgttatcaatggatgttattcctgttcttgctcaatggcaaaaagaaggaaatactggtaagaagaaaaaagataaagtaactcgttatgtgactttagtcttagctgctattcaaggtggttcattaacttatgcatttgataaaatgtacaatattttgaactcatcatcaatttggacttatgtctatgttgttattgttatgatggcaggaagtatgttagcaatgtggattggtgatcaaatcactcaaaagggtgttggaaacggaacttcattgttaatctttactggaattgtttctaacttacctacaaactttattacaacattcaataacttggtttcttttgataaaggaactcaaacaactgttcttggaattttatggtatgtcttattcgtggttgtttatttagcaattgttatcttcgttgtattcaatgaaggagcagttagaaaaataccaatcatgtatgcaacaaactctaatccaacaatgagaacaaaagatacaacacatatgcctattaaaattaatagttcaggtgtgttaccagttatctttgcagcatcagtgttggctgcaccaagaacaatcattagtttcttgaaatcaactgatattacaaaaacaattgatacaatcttaaattatcaacaacctattggtttctgtttatacttaattatgattgtattgtttgcattcttctattcaaatttacaaattgattctcataaaatcagtgatgatttgaaaaagaatggaggatctattcctggagtaagaactgggttagatacagaaaaatatattagtactgttttaaacagagtaactgttgttggttcaattttcttagtgattattgcggctatcccaattatgactccagttatttggtcacaaacatctaatgcagccttaacattaggtggtactggattaatcatcattacaggtgttgcacttgaaacaacaaaacagattaagacattaattactcgtaaagagtatcatggctatattagaaagtagtataataaaggagtgtataacaatgaacattattttaatggggcctcctggtgctggtaaaggaactcaagccactaaacttgttaacaagtatggtttgacacaaatatctactggagacttattcagaaaggcattaagtgaacaaactaaatatggtgtaattgcaaaatattttatgcaatttggtcaccttgtaccagacgattatacaattgaaatggtgagggaatatttaaaagaaaatacatttgaaaatggatttattttagatggtttccctcgtacaatcgttcaagcaagagaacttgaaagtattgctaaagaattcaactttacaattgatgcaattgtgaatttagatattcctcaagaaaaattaattacgagattatctggaagaagaacttgtaaaaattgtggagctactttccatgttgaattcaatccacctaaagttgaaggcgtatgtgataaatgtggtggagaattgtatcaaagagaagatgaaagcgaagaagctgtaacaatcagacttgatacttataataaacaaacaagacctttaattgattattatacaatgaaggggacaatcattaatattaatggtgaccaatctatggaagacgtctttaaagacattgaaaaaagcttggagggtaaataatgattgtaactaaggaccaaagagaaattgaattaatgagagaagctggtcgtatcgttggacttgttcatagtaaacttaaggattatattaagcctggtcttacgactatggatatcaataagttctgtgaaaaagtaattcgtgatgcaggggcaacaccttcatttctcaatttgtatggttttcctggtgctgtgtgtacttctattaatgaagtcgttgttcatggcattcctgacaatacaaaacttaaagaaggtgacattatttcagttgacgtaggtgcatgttataaaggttatcatggagatagcgcttggacatacgctgttggtcaaattagtgaagaagcagcacacttaatgaaagtgactgaagaatcactatatgcaggtttagcgcaagtaaagcctggcaatcgtttatccgatatatctcatgctgtacaaacttatctagaaagtcatggatgctcgactcctagagactatacaggtcatggaatcggtactcaagttcatgaagatccatccgttcctaattatggagcagcaggaagaggtcctagattaaaagagggaatgactttagcaattgaaccaatggctcatttaggcagatgtgaaacagaagttttagatgatgattggactgttgtaactaaagatcgatctctagcagctcactatgaacatactatcgtaataacaagtgatggttatgagattttgacaaaactttaaaagggagttataatcaatggcaaaaaaagatgacgttattgaagtagaagcaactgtccttgaaacattaccaaatacaatgtttaaggtagagttggaaaatggagcggttatccttgctcacgtttctggtaaaatccgtatgaattacattcgcattttaccgggggataaagtaaccgtagagatttctccatatgatttaacacgtgggcgaatcacatttagacataaataggaaatcttccaaaaggaggtaaagattaagatgaaagtaagaccatctgtaaaaccaatatgcgataaatgcagagtaattaaacgtaagggtagagtaatggtaatctgtgaaaaccctaaacataaacaaagacaaggttaataggaggaagtaaaacatggctcgtatagcaggtgttgatatcccacgtgataaacgtgtggtagtttctttaacttatatctatggtattggagcaactacagctaaaaaaatctgtgaagctacaggaatcagtgaagatacaagagttaaagatttaactgaagaagaagaaggaaaaatcagaaaagaagtagaaaaatataaagttgaaggagatcttcgtagagatgtagcattaaacattaaacgtttaatggaaatcggaagctacagaggaatccgtcatcgtaaaggacttccagttcgtggacaaaaaactaaaactaatgctcgtactcgtaagggtaaagctcgtccaattgctggtaagaagaaataggaggttgaacgaaaatggcaaagacaaagaacaatactcgtggtaaaagacgtgtcaaaaagaatgtagcaaaaggtgtcgcacatgtacattcaactttcaataacacaattgttactgtaactgatgaacatggtaatgtcttaacttggtctagtgctggtgcacttggattcaaaggttcaagaaaatcaactccatatgctgctcaaatggctgcagaagctgctgctaaagcatctatggatcatggtatgaaaactgtagacgtatgtgttaaaggtcctggtccaggacgtgaagctgctgttagagctttacaagctgctggattagaagttacatctattaatgacgtaacaccaattccacataacgggtgtcgtccacctaaacgtcctcgtggataatgaagtaaactatagtagttatttctaagtgaggagggaaataatgcaaaagttcgaaaaagcaaattttaatgtcgcagaatatgatgaaagtgatttctatggaaagtttgtcatcgaaccattagaaagaggttttgggacaactttaggaaactctttacgtagagtcttattgtcatctattcctggatgtgcagtacatgctgtaaaggttcaaggagcaatccatgaattctctgcagtagatggtgtagtggaagatgtcacttcaattattttgaacattaagaagttagtgtttgcaattgatggtgatgacgatgtcactatgattattgatgtaaaaggacctgctgttgtaacaggtgctgatattcaatgtccatcaaatgtgactatgatttctaacgatttagaaattgctcatgtagctgaaggagctcatttctatatggaaatgtatgctcatagagatagaggttatatgagtgctgatcaaaataagaaattgattaatacaattggtgtgatcgctactgattcaatttattctccagttgtaaaagttgcttatgaagttgaaccaactcgtgtaggtcaaagtgcaaaatatgatcaattgacattagaaatcacaactgatggatctattcaaccacatgaagctttagcattagctgctaagattttagtggaacacttaaatatgttcgttgaattaactgatatggctatgaacatggaagttatgagcgaaacagaagaagatacaagtaataaagtactagatatgacaattgaagaattagacttatctgtacgttcttataactgcttaaagagagctggtattcaaacagttcaagaacttgctgctaagagtgaagatgacatgattaaagtcagaaacttaggtaagaaatctttaaaagaagttaaggaaaaattagtagaattaggtttagggtttagacctgtagattaattctatagaaaatattggaaggagcactaatctatggcacaaaatagaaaattagggcgtgtatcatctcatagaaaagcaatgttacgtaacttagctacagatgttatcatgtatggaaaaatcgaaactacagctacaagagctaaagaagttcgttcaatcgtagacgaattaatcactttaggtaaacgtggagatttacatgcaagaagacaagctgctgaagtattacaagatgttgtagatcctgctactggtaaaactgcagttcaaaaattatttgatgaagttgcacctaaatatgcagataaaaacggtggatatactcgtgtcttaaaaacttataatcgtaaaggtgataatgcacctatggctattatcggtttattctaataaacacaaaagtgatgtgaatgcatcacttttttatttgtaaattttattaacaaatatacacttcattatataaagatattgttaatcttatttcaaatgaaagtgaatgactagaattcttgcattgatagaactacaatagcactgtcaattgaaggaggacggtatttatgaataaagaagaaaaaattattgaagaagctaaagaatcttatgagacttattttaaagaatcagaaggaacaacagatgaggctcatagaggaaaagatattattttagacaatgataagttggaaaaagaaatttctaaggaaaaagaagatgttgaaaagaaacatgaatctttagaagttttaagagaaaaaataaatgaagatgcagaaaaatcttatgaaacttattttaaagaatctgagggaacaactgatgatgaatacagaggtggagatgttgtcttagatgtagataaaatagaaaaagaaatagctgaagaaaaagaaactattactaaaaagtagtgacttatgcatttgtctttaaagtagttaaacctatcagtacgataaagatgtattattaaagagagataatttaacctatctcttttttttgttcaatagaaatttctattcgttttgcttagatatgccaaatgcaaaggcatattagtgtataaagcagcatcgtatgtcatagcaaatcagtaattagggaaaacattcatgatgcgaacaaggctagaccatgtggctatagtgaaggaagttatcaacatgatgtataaaaagagttatatctaactaaatcgaagaatttatagacgataaataacaggataaggaaagatataactttattcaggctgcaagataaacctgaagataaaggttagtgaaatattcaaagattaatcccttttctgattatctttacatcattagtaaagatagctataatgagtaggggtgatgtaagatgttaattcatagaatagaaaaaacacatttttctgaaagcgaagcaattattattgattacattttaaaaaatggggatcaaataaaaaatatgactatttcacaaattgcaaaggcaacttatacatctgctcctttactgataagaatagctaaaaaattaggatattcaggatggaatgcctttaaggaagcctatttaaaagaattagagtatttatatgctaatcggaaaatagatgccagcattccatttattgttagtgatgatataatgacaattgctcagaatataagtctgttagaagttgagacaatacaggatacattagctttactcaaacatgatgatttacaaaaagcaatgcaattaattcgtcactgtaaatcaattgatatctatgcagtatctacttatatttacttggctgaaacttttcgtcaaaaaatgcaaagaattcaaaagaatgtcaatctttgtcgcttaactggtgatgctaagatacaagttgcaatgagtaccaatcagacatgtgcaattttaatttcttattctggtagaacgcaatttattattgaagcagcaaaaaaattaaaaagtaaaggcacatcaattattgccataacaagtattgctgataatgaactttcacatcttgctgatgttactttacggatgtcctcaagagagatgattcatacaaaaataggtgattttgcaagtacacaatcagtaaaatgtttattagacattttatattcatgtattttttctatagattatcagcataatttggactattgtattaaaatagctaaagaaattgataaagctaacaatattgaagaaaacatagattatgaagtataagttaagaaaatatggttttcacttttttcttttgtgttgtggttgacaagttgtagtaatcatactaaaattgaactacttggaggaaaagccatggaaaaaataatcgaaataaaggatttatcgtttgaatataaagaaggtgtcaagacaattgacaatatctctttttcaattgaaaaagggacatatacaacaatattaggacataatgggagtggaaaaagtaccattgcaaaactcttgatgggattacttgaaaaaaagagtggtcatattattgttggtggaattgagttaacagaagagacattgagtgaagtgagaagtcaaataggtattgtttttcaaaatcccgataatcaatttattggtgcaacagtcagagatgatatcgcatttggattagagaatacatgtgtggagccgtcacttatggatggtattattgaagaatatgctaaaaaagtaaacatgtatgaatttctagatcatgaacctacaaagctttctggtggacaaaaacaaagagttgcgattgcaggaattttagctatgtcaccatctattattattttagatgaagcaacaagtatgttggatccaaaagggaaaaaagaaattaattcacttgttcatcaattgaacaaagataaggatattactattttatcaattactcatgatattgaagaagcagctttatctgattatgttgttctattgagtgatggacatattattgatactgggaaacccgaagatgttttaatgaaacaaaaagaaatagagtctttagctttagatgttccttttgcatataaaatttcaaaaggattgcaggctcaaggaattaaagtaaataactatattgatagagaaaagttggtgaaagaattatgtcaattacattcaaagaagtagaacatatatatagtgaaaatacacctttttcttatcatgcattaaaaggtgttaatttagatattaaacaagggagtatgacagcattaattggtcatactggaagtggaaaatctactcttatccaacatatcaatgccttgttattacctacagcaggagaaatacatattgatgattttttaataagtgtaactgataaaccagagactttaaaaccattaagaaaaaaagccggtcttgttttccaatttccagaataccaactttttgaagaaacaattcaaaaagatattatttttggacctaagaactttggagcaactgaagaagaagcacttgctgtcgcaaaaaaagtcctaaaattagtaggcttagatgaatcttatttagaaagatcaccttttgatttatctggtggacaaaaaagaagaattgcaatagctggaattcttgctatggatccagatattcttattttagatgagccaactgctggattagatccacaaggggctaaagagatgttaaatttatttaagaaaattaatgaacaaggaaaaactgttattcttgtttcacatgacatgaatcaagttttagaatattgtgatgatgttgttgttatgaataaaggacgtgttgaacgtcatgtcagtgttgatgaattatttagagaaacagaatatttaacttcattaagcattgatttaccaattattacttctttcattttagaattaaataaaaatggttttgatatcgatccttcaattaaggatattaatgaacttattcaagtgataggaggacaaattcatgaataatatgatgtttggaaaatatctacccattgatagttttgttcatagattagatcctcgtttaaaaattggagcattattattgttattgattgcagttttctttgatgcaggatttttaggatatgctattttaggtatatttgttattatgatggcattattatcacatattaaagtatcacaaattataaaagcaattaaaccaatgttatttatgatggcatttttaatgatttttaacttgttgtttatacaaagaggaacattgttatggtcatttagttttattaagatttatgatcaagctttaacgcaaacggcatatatctttattcgtttggtattaatcattgttatgacgacaattttaactgccacaacaaaaccattagatttaacacttgggattgaacacttattatcaccatttaaaaagctaggttttcctactcatgaagtcgctatgatgatttctattgctttacgttttattccaacgcttttagaagaaacgcaaagaatcatgaaagctcaagcaagtcgtggtgttgaattttctgaaggaactttgaaacagaagattatgtcaattgtttctctaatcattccactatttatttcagcttttcaaagagctgaagatttagcaaatgctatggaaagtcgtaattacaatcctgaagcaaaacgtacaagatacaaacaattacattggaaatttgctgatactatttcctttatttgcgtaattgcaatgtgctctacattggttgtaatgagtatagttctatgagagtaaaatgtattgtgagttatgatggaagtaaatttcatggctttcaagttcaaaataaagaaagaacagttcaaggtgaaattcaaaaagctttaaaaaaaataaatgaagaagatgtgattattcatgcttctgggagaactgatgcgaaagttcatgctgtgcatcaggttttccattttgacactcaaaaacagttaccaccacaacaatggaaacgggctatcaatcattttatgcctaatgatatctatattttagatgcatgttatgtagatgaagattttcattcacgttatagtgcagtaaaaaaagaatatcgctatttattaagtacaaaagaatatactccatttgaaacaaattatatatttcaatatggtagagagttagacattgaattaatgagagatgctgcaaagatatttttaggtgaacataattttgcatcattttgtagttatgatcagtatggaaatactattcgtacactttattcatttgatataagtgaagaaaatggaattattacttttcgtttgattggcaatggttttcgccgttatatggttaggcacttagttggaggtattattcaagttggtgctaaacgtatttccaaggaaatattgtcagaaatgctagaaagctgtggagaaaagaaatgcttatttaaggcaaaaccacagggtttatatttacaagaggtatattatgaagaaaactaattatcatacacatacataccgttgcggtcatggtgaaggcgatgaaaaagcaatggtgcaagcagctatagatatgggaatagaaaagttaggaatgtgtgaacatgttcctttaccacattatcgtcaacatttgttgaaatccatacctgcaattagaaatatcagaagtgttctatcacttgttagagcattgatttataatggtcctaatatgcgtatgccatataagcaaatggatgaacatttagatgctattcgtcaatgtcaaaatgagtttgatggacaaattcaaatttataaaggatttgaagctgaaggtttagaagaatattatgattattatcaaacattattatatgaacataaagttgattatttaatcttgggacatcatttccataagcattgtattcataattgttattatggaaaagcaaatatgactaaaaaagatatttatcaatattgtaatgatgtagaaaaagctctagaaacaggtttgtttagttatttagcacatcctgatttgtttttacagggataccaacaatttgatttagatgctcaaactgtttcaagacgaatttgtcaaaaagctaaagaattgaatattcctttagaggttaatgctggtggaatgcgtaaaggattaagagatattcaaggtgaagaattatatctttatcctaatgctcatttttgggatattgctagcgaaatagggaatgatgttattttaggatttgatgcacataatccttcggattttaataatgcaatgtatgatcagatgattcgttttgctaatgaacatcatttgaagttaattgatgaatttgaatttttacaaggaaattttgaaaaatttcaaggagaatatgatattcgctaagaagaaaagaaattttcttcttttttttgcaactatttgtaagtttaaattgtattatagatgaggggagaaatgattatgcaagatagagaagggcattataaatttgaagaagcttttataaaatatagtgatatggttacacgaattagtattttaaacttacgaaatagtgcagatgcaaaagattgttttcaaaacgtatttatcaaactttatcaatatcagaatacatttgaaagtgaagaacatttaaaagcttggttaataagagttactattaatgaatgtaaaaactttcaaaaacttttctataaaagaacaatagatatcgatgatgttattgtttgtcaacatcaagagcaattgattcttttaccaagtgttttaaaacttcctcgtaaatataagaacgttctttatttacattactatgaaggctataaaacctttgaaatagcagaaatgttaaatatgaatgagaatactgtaaaatcacatttaaaaagaggtagggaattattaaaaaaagaagttggtgactattatgaataaatttaatgaatttgataatatcaaaacgcctgatgattggaaaactattaattttgaacaagcctctcttaaaaatcactatcctatagcatcacactttgtcatgattggtatttgtcttgtacttatcttttcttcttttggaattgtttatgcttataatgaagaatttagatcatggctacaagaacaatttcaaggtgaaaaaatagaatatattcctcaaatgcatgaaaataagatgtgggaattagatggtaagtttctagtttattatcatgaaaaaaataatttaaaaattgttgatgaagtatatatattcatagatggtaaatttgtaaaaaaagaagtgatgcataagcaaggaaaatataaattgcaagattattcttttgattatgttcgttatcaagatcaaatctttacatttaatgaaaaaggtttttttgcatatagtttacatttgatgaaagatgaacttatttattttggttcaactgacaacaatttatgttctcttaacatgaaaactggagaggtgttagaaataacaagtgaccaagattcagttaactttgctatatcaccaaatcggaagtatatattaattaataagaatgataaatattggacggtttataatactgataagcatacagagaaaaaaataaatgagatgaatccatatgctcataatgaagaatatgatttttttggtgaacataatttaattacttatgatgatgatgaagaaacagttattattaatttagaaacattagaagctaagagtttaaatgaaacttgtttgtacccagcaccttcatcatttaccgtagacttttatgatcaacaaacgacactgcataatcatatcgatggtaaaaaaataaaaataaatgaaaatttagaaaactatcgctattcgatttttcaaaataggtatattatctttgactcttttcttgataaaaaaattgtatttgttgattttaaagaacaaaagtataaggttttagaatattttggtaaggaagaatatttagagtatttcattgttgataaccaatatctcattatcaataatactcaagattactatattatgtcttttcaaaatatattttcttaataagtcctaacaagatcaaatttatgttgacaaaatcagcgatattgctataatagaaagtgccttattttaacgtttgtagccccggaaactacaggaggattaaaaatgagacaaacaactatggctaaagaagccacaattgaacgtaaatggtacgtagttgatgctgaaggtttaactttaggtcgtttagcatcagaagtagcaactgtattaagaggaaaacataaaccaacttatacaccacatgtagatactggtgattatgtcattatcattaatgcagaaaaagtagtgatgactggtaaaaaattagatactgtaaaatactatcatcacactggatggttaggtggtttaaaaactaaaactgctcgccaattccaagagtcaaatcctacaggatttgtagaagcagctgttaaaggtatgttacctcataacacacttggaagaaaacaagggatgaaattatttgtttacactggtagtgaacatccacacgcagcacaaaaaccagttgagttaaaaattaagggataggaggacgagagataaatggctaatgtacaatacagagggactggacgtagaaagtcttcagtagcacgtgttattttaacaccaggtgcaggaaaaatcgtcatcaatggtagagaagcaaaagaatatttaccatctgatgtattattaatgatcgtcaaccaaccactagaattaactggaacagctggtaagtttgatgtgactgtaaatgtttatggtggtggatacactggacaagctggtgctatccgtcatggtatttcaagagctttagtagaagctggttctgattatagaccagtattaaaagctgcaggattattaactcgtgatgcacgtgttaaagaacgtaagaaatacggtcttaaagctgcacgtagagcaccacaattctctaagagataattattattgtttcttaagagagcaaaagaaaaccacaaaaacgagaaaaagcctttatttaagggctttttttcatattcagtgattttatgaattttcataaaaagtgggagaagtgctgtaaaatttggaaaaagtggctcagttggtggaaaataagcaacaaataagcaacaatttggcgtaaaatccggcgtaatttttggcgtaaagttggcgtaaaatttcaatccctcgctgacattgttttatccatgcgatagaatgattgtgtagaaagcgtaaaggagtgaaaattatggaaactatcagtctggcagcagaagtcataggcagaagattatcagaaatacgcaatgaaagaaatctgacaattcaaagaatggctgtcaatgcggatatcgatcctaaacatctgaaaaaaatggaaaacggaatatcagaaccctcagtacttgtacttaataaaatcatgaaaagcataggtggaaatctaactgacttctttgattaccactttgatgagatatactttttagtcattgaagaaagaggcgattgctttgagaaagagtagtgtcttaagtgatgatgaaagaattgaacttgaggtccttggaagacgtttaagagagataagagagaagcagggaataacagtggcagaactggcaaaacttgctggagtggatcgtgacagctattcaagagtagaaaaaggagagagaaatgcttcgctagggattatattcaagatagccgaaggattggaaatattgccttctgacatattcaataaggattatcttgaactgcataatgaattgaataaacaaagagagattgattccatactgactgaagatttttgtcggcttgtcaataaacgcaaggttatatcacttataaaacgatatagaaaatcaaagcatatcagccagtataatctatcattaagaatgggaatatcacgaaatgtcattaacaatctggaatatggcagaggaaaaatcaatgctgtgctgttaaaagcaataatgagtgtgatggatatgacgatagagcagctgcttaatgaaataggaatgagctaattagatagtctggtgttcaaatatgaacatcgttttttaccttgtattactctaaataagatgtcataatagagttgataaaagaattagaatttatgagataagaggatgctaacaggatattattgtacaaatatcttttctggacaagcaaaagaattgattgctttttatagagatacattagaaatacctttcatcaagacagacgtagatttgaccagtggagtttattttggttttttggaaaacgcaccaacactttatatatgggattgtaaagtgttcaatgcagagcctacgggacatcaatcatttgtttttcaaacagatgatttagatttaacgatggaatgtttgaagaagaaaaggggtgccatatcagaagcggttagatatgattggggaacttgcgaagttcgcttaaatgatattgatagaaacgaaattgtaataatagagtttgtgtaaattataaatactggttcattgaggtcatacatgagaatacaataacagtattataaaaaataaatttgaagtcataaaggagaaacagtatgctggatataatacatagtgcagagggaatggttactttagtaggacaatcattatatgatgtatggaatgaattatgcagtttaattgatgaaaaatatgaaatggaatgcttatggaacaaaggaggtaaagcgtggacttatgaatataagtaccgtcgttgtttcaatagagaaataatcaattgttagtgctattatgaattattactaagagaaaaataagaattttggaggaagctatggaaaagaaaatagttgcatgggaaccgtggttttttatatttttcggtttatttcatttacatagaatatgggggctgtttgatagaactgcgtatgctcgattttggattggtatatcagaaaataaaggattattttattttatattgatgggtacattggctttcctttgcgttttaggggttgttacattttgcaggaacatacataataactattggtggagatggatatatttatttggtggtatttatgtgttatttgatttatatgcgattgctgttggcttagaattctggaataaatttttattgtggatgtatgatgtgaattcaccttattggaatcttatatggttttcttttgtgttgcttggtggttttgtatttgtattaggcataaaattacttatacaaaggaaaaaataaattctagtttagcggactggacaaatttcagtttatgtgattataggtgttcaaatatgaacaccgttttttaaatcttgtattctagattagaagatgtcataatagatttaatgcaagacaaaccataatttgtgtagaggggaatttatatgaatgagtatattgttgatttagagcaagaattatctttgatagaaaatggttttaaagtggaagaaagcagagccttaagtgattataaatctcatgataatgaatttattaaaaagttggcatttttagcatacaaatctatggtatatcaagtaagaatgtatgccgtatttctttttggatatctatcagaagatgaaaatattttagttttcatgagagatacagtttctaatgatgataactggagagttcaagaaatattagcaaaatcatttgatgagttctgtaagaaaaaaggatacgaaaatgctattccaataattgatgaatggttgaaaaacagtaatcctaatactcgaagggcagttacagaaggtttaagaatttggacgagcagaccttatttcaaggaaaaccctattgaagcgattgaacgattagctgatttgaaagaggattccagcgaatatgttagaaagtcggtaggtaacgctttaagggatataagcaaaaaatatccagagctgattaaaactgaactggatagttggaagttggaaagcaaagaaatcaatcaagtatataaattggcaaataagtttgttaagtaacaaattccagtttgcttgatttcaggtgttcacatttgaacacctttttttaaatcttgcattctagtttagaagatgacataataaacttaatagaaggaaattggaatttattggagagaactattatgtcaaatataaaattaagaaatacattcaagtcatatactatgatatttataatcggtatattagtaggatgtatatgtaggttgctggattactttccagcagatacgctatggagtttttcatcaattcaaacgctgttaggattttggattattactaatactatcattgttctgttaagcacctcaaatatttgtgcaggaattagttcgttcttatatatgtttggaatgacatttagcttttatgccttacaagcaatattaggaatgtttatacccttgttttctggtgcatttcgcttttcgctatttgtattgttcaccgttctttcaatcttttgtgcaatagcggcatttattctatattactggaatagggaagacatttttagctcagtattatattctttaccagtaggagcattagctgctgaaacaatagtaatttttatttattttttggaacatcatacattcctgtttcagtttttgatggatattataggtgctgttttgtttggtataatattttttaaaaaagtaaaatatagaaaaatgtatattgctggaattgtattaagtactttagtattctattatatttttccctggtagattatatttacaaatcccagtttgtttgatttcaggtgttcaaatatgaacaccgttttttatcttgcattctaattaataggatgtcataatagagctaatcaaagataaattagaatttgtagaggtaggaaaatgcttgaagttaaattttatgataatgtagatgatagattattaaaatttgcagttattatttctaagtcaaatggtcaatgggtattttgtaagcataaggacagaaatacttatgaagtaccaggcggacatagagaaaaagatgaacagattttagatactgcaaaacgtgaattaaaagaagaaactggtgccattgattttacaattaagcctatttgcgtgtactctgtgaaaggaaaaacaagagtaaatgagaatccaaatgatgaaacatttggaatgctttattttgcagatattcattcattcgaagaaatacatagtgaaatagaaaaaattattttaatggacgatttagtgaaagattggacttatccattaattcaacctaaattgatcgaagaagcaaagcgtaggggagttatataaattataccccctttttctatactataagtgataaacatattcgataatcaatacttttgatctattattatagtaatgtgaagattattatatgcaaataatatatttaataagacaataatatcacaattcatgacaaatatttgattggaaattaattaattacaattttataattaaatgtaatttacttgtgcttttaaaaaatttgataatcaatatgtaaatggttatatatttttagggatgagaaaatgttattgtgggtaataaaattaattatgtcttagatgatttctatatcaggatactttattttagttttgataattataaaattacagataaaaatctaagagaagtttacgattaaaaaaacgtttaagaactgattgtaaatggcttgttggtgttgttaaaaccattaaaatgaaatggataacacttttacaatacataaaacatggacttcatgttatgttaaaagtgagaagagaatgctagatgcagttttgtatacaaaagtaatgaaaattaccttaactaaagataataagattataagtatatgtaaacttattttattaacacaagaaaatacatctggtattgtagaatacgattttataattcttaataaagaagagtataaagtatattataaaaggattatacaagaaaggctggtagggtattataattaactgttaatcaaagattattttataaaagaaataaaacgatgaattaaaaacatagatataaatcgaaagggatagattattatgttcttttatagcaaacattacagaagatttctctacatgttggaggaagttctatgaatactaatgattttttacaactatcaaaacgtaatatttttcatacttttattaaatgcaaagatgagagtgattcaaagtatattctaaactatgcaccatcaattattgttgaatttaatgatgatgagctagatatcaaggattttaatacaaggaaatctttattaaaaattaaatatacagaaatggtgtcaattagtttatctgtatgttctaggttaatggctatgagatttgccccaaccaaaatgtatgatatagaatatattattaaaacagattccaatgaatttcattttgaatgtaaaaatccattaatttggaaagagatattaaaaattttaaacaatcatcatgttagcataatagatccactatttcttgtaaaatgtatagaaaattgtgatcaaggagatggtttttatgatttttgtcaaaagaatattgcttcttggaaagaaaagtataatgttttagatccaaaagttggagatttaattagaaaatagataaatatctatgtttcatcgttttatttttgttaaatttcctttttaaagaatgagggtattcctcattcttttttgtgataaaaaagtgatttaagcatctttcaatcaataaaattaacatataatagagataatatctcatttgtttgttgattttattgataataagcctataatataaataagaggtgattattatgttaattcaatttaattttaaaaattttaaatcatttagggatgatgcaacactagacttatcggcaactaagataagtgagtttaatgatagagtaatagaattaggaaatgaaaagatattaccagttgctgcaatatttggagcaaatgccagtggtaagtcaaatgttcagcaggcgttttcatacatggtatattatgttttacgttcatttgcgtttggtggggatgccgatgagaaaaaaagcaaaagtgaatttatgaaacctacaccatttttatttgatagtaccagcaaagatgcaccatcaacgtttgaagtttattttattggagaagaaaaggataagtatagacagtacaattttgggtttagtgtagataaaaaaggtgtttgtgaagaatggcttaatgtttgtgcaaaaagtgcaagaggaaaatttaaaccaatattttataggaatagagataataatgaattagatttaagtggtttacccaagaaggttcatgataacataaaaacttcattacagaatgagacgcttattgtatctttgggtgcaaaattaaaagttgagaaattaaagtatattcgcgactggttcttgaagcatgaaatggctgattttggagatccttttgaaaatttatttctttctagatatacacctgatggtttttcagataatgagaatgttagaaaaaaagtagtagactatttttcgtcttttgataattccatcattgattttaaggttgaaaaactaaaagaagatgaagatgataacgaacatttaaaaattaatacagtccatagattaattaattctgatgaaactgttactttacctttgcaggaggagtcagcaggaacgttaaaaatgtttgccttatatccttctttacaggaagtcatggaaacaggtggtgtactatttgttgatgagttaaattctagattacatccattacttgtgagaaactttttaatcaattttcttgattcttccatcaataaaaatcatgctcaaattatttttactactcatgattcatggacattatcaaataatttattaagacgagatgagatttggtttacagaaaaagatcgtgatggtatttcatcgttgtactcattagctgattttgtaaatgaagatggtcaaaaaataagaaaagatgagaattatgaaaaaaattatcttttaggtaagtatggggcaattccagaattgaagtcaatgatagtgatggaggatgaataatttatgggaagagaagatagacgaggcaacagaaaatctagagaacaatctagaaaaagatttgtataagaaattatgtgaatttgtaaatgaagaaaatgcaattaagatagctcaacaaaaaaggaagcaatgcattgaaaatggattatccgttccatctaaaatgataccttgtacaatggtagatgaattaataaaggaaataagacagaagtcacaagaatgaaaaatatgtggtcaatatgatacatgataaagaaagaataacgaaaatagcgattgcttattaagaacaatcgctatttttatagaaaaatatacttgttaatcatttgcttcaaagccatttttcttataaagtacaagaaataaaactgttgcaatgatgatttcaacaattaaaataattatactatttatttgaaatggatgagcattgatgctaatttgatttgcaaagtccatgataacaccagtaaatgtgagagatgatattgtatcaagaataggatgaataccatttaacattggtaaaagtaaaagcactagcataaatggtgttgttattatacttgcattcatctgatcttttgaataaataccaatcagcatacctacaattgtgccgatgagacttgataaagttgttaacaacaagtaacatccccattgtataactgtcatagataaaccagtgataaaaggaagcaaagtattaacaacaatggattccataagaacaggtaatacactgccaaaataaaattccatcccattaactgaagatgtcatcagaactcttaatgtatgtttttctttttcttcagcaagtgaacctgcaacacaaaagatactacacatacaaatattcataataacacagtttgctagtgttgatggactcatttttccactttccatatagacactagacataaatcgcatcaaaagtgcaaaacctatcgaaaacaatggcatgatgatatatgtcttatcaagtaaagttttacttttcacttccataactgctaataattttcttaaatgaatacttttcattctaagcccctccctgttacctttaaaaatactgtttctaatgttggttcacatgagtgtagtgtttcaatacggttttctaataaccactcattgagttgtgataaatcttcttttgtttgatgaatcacatattcttttttatcatctaataaaacatgatatttcttttcagtgttgtattttaaacatagctgatgaggtgttccaaactcaacaatttcaccatcatttaatagtgctacatggtcacagagttttgtggcttcttccatgttatgtgttgttaaaaagatagccattccttcacttttaagttctagtaagagttgatgaatttttaaagcagtagaaggatctaaaccacttgttggttcatctaaaaataagacttttggtttatgaagaattgctctggatagaactaagcgctgtgtttgtccttttgatagttttgaagcaagtttatttttgtgttctaataacccaactctttctagcaaaatattaatctcttttttatctacaccatgtattttagaaaaataacgaagattatcataaactgttaatctttcatacacaccactcatatcagtgacgattccaatttgttcatagattgtctcatcaatgtttttagaatcaataccaaagatacaagcttctcctgatgtctgatgcagctgacccgtaataatcttaattgttgttgtttttcctgctccactgggtcctaaaaaacctaatatttctcccttatgcaggatggcattaatatcttttaagacaagttcgttattgaatttctttgaaacatgatttaatttaataatttcattcatatactattcctccttcatcacgttatatcttaaagaaaataatataaaaaagtgaaatgtttcctaaaaggtcactatgacttcctaattaacaaaaaaattggttactgtgaaccaattttgcttaataaatttgatttttcttttcttgatattggtatagactgtcctgctattgtgagtgtttgatgttttaaatcaacagattcaatcttatcaatagaaaccaaataagagcgatgaactttaataaagttttgagataattctttttgaatatcagaaatattccctaagaattcaatatattgattttttccataaagaataacataatgagaacgtgaagatgtttcaaaataataaatgtcatttagcggaacgtgatagatcacatcactgcttttgattgtatagcaggcaatgggatctatattttctgtttgcagtttctctatcaatgatgataaacaaccagcaatagactcagcgagtttttctggtagatctttaacgatatagtcaaacgcttctaaatgatactgaaaagttttgtatgctaaatccttatagctagtaatataaataattgaaccattaggatcaattgcacgaatttctttgcctaacaagaaaccatcaaaatccttattttttaattcaacatctaaaaaatataaattacactttgtttcttctttttttattgctgataagagctcttctggcgaagttgttgaacaggcaatttccatatcataattttgaataagtatttgtttggcaattatatcagttattttctgacagatgattttttcatcatcacaaataaacgccttaatcattttcttcacctcgtttgataaaaatatcttgaataaacttttgttcttttatttccgtcatatgtgaaatacagttataggagtttataattgcttttagacttgtaagtccttgaccactatgattatcttttgaagaataaccttcctgataaatcttcatcatatcaacatcactataaattgtattttctacaattatatgcaatccttcactttgattagagagaatcaatgttattttacctttatgttctttaacttcttcgatagcattatccattaaaatgccaataatcctacacaaatcaaatgtcttaataggagtcttatcaattggatacataacctctaaatgaaatgcaatatcattcttatctatctctgtcatcttttgaaatagaatacttttcaattcagtgttgataatttttgagatttggtttgtaagattcattttcttatcaatattttcatcaaaatcatcaataagctggtgtaaatcttgttcaatagcttcaatatttccttgggttgattttaaatagagagatgtcatcatgtttttgaaatcatgtttaaaacttctcatattctggtgaatattttctaaatccttaacatataattcttgttgttgtaaaagaatttgtgaatatttcttttcttcttgagtacgaataagtgcagtatagttttttgaaaagaaataaataataacaagcaggataataagtaaagtaaattcagatatattaaagttaaatgtttctctattaataataatacgaacaataacataagataaatcaataccaatagatatcaaaataactttgaataatgatgtttcctttttgtctaagaaatgctctaaaaaggagaaatcagatttacgaataaagtaagataataatacatcacttacacatacagcaatgagtgaggcaaataaataagtataagtattggtgtttgcaatggcatagcagaaattgttaagaataaaaaaaacaaattcatacaaacaccatgatatagatgaaaataaagttactcttttcaaatttttatctaagacaagataaactgttacaactaaaacgaaatagttaaatagattaataaatgataaatatattgctgtaatcaataattcattttgcaaagttgtcgtaagatactgatatagaaaatctagggcttttgtaaaaataggttcatatataatggttgctaagatagttatgatgatagactttttgatagaaattttatttctacatagtctttgataagaaaatacaataaacagcatcattaaaaggtttataaagaaaacaagtatatcatatagaaatgttgacatgtgtttacctcctcaaatagatggaaatatgaaaaaatatgtgtatgtcgcaatcaataattctttgcaattaaacactaattatttgttttttaatttttattcatctgtcactgtaaaaatatcttcaatggatgcattaaatactttagcaatattccatgctaggacaagtgaagggttatatcttcctttttcaagattgccaattgtttctctacgtactcccacaagctttgctaaatcatcctgtttcatgttatgttttgctcgaaattctttgatattattcttaatcattttctaagccccatttctcttttaaaccataataagcagttgataaagaatacattatgattgctacagaccaaccatatgataatcctgttgacaatgcattatgactagtattgctttctacaagaaaggaaaatagagtcattaaagcagtggtaatcataccactgtagaaaccacgtgctgctgatttactcatatattcttcaagcatttcatcagatttcataaaccagtaatcaaaatcaataacaaatgcaaaaaagagaagaaaacttttttcgttggtgataataccaagaaatcctataagggaaagaaaccccattgatccatacataaattttcttagattcataatttattgctccttatgtggtatatttctatcattatgatataaatataccacatattttttaaaagtgtcaacataaagttattatgtgttatcaaagcatgtttttttgttagaagaatatgttcattgagtattacttataaagtcttgaaatgatatattgttaaaatatttgacaaagttctaaatatctttggtagaaaaatgagaataatttaatatcttttttataggagagataaacaagaatgggtttagaaaataacattttagaagcaagaaacacagtatccaacgatgatgagttgagtagaagaaaaatacaagtaaaaggatgattgatatgaatataaaaataaagattaaggaaaatcaacaattactttttattgctttaggatctgtgatagggttaatgataggattcttactttctaattatatggaacttgatacagtgcaaacattgcaagaatctacgagaatattaggtaaagaattatcagtgcaaagtgcatctgatttaattcactttcaaatgacagcagctttatatggacctattttgtttaggattatttaatggaacatatttatttataaatttatataaataaataagttattttatcagtgaataataatatatgctgatataatattgtcatataaagaactaacacttaagtcattaaaacatatatttaaaggtgttaaaatatggataccgtttttaaatcttgtattctcgtttataagatgtcataataaatttaatgaaagaacaaatgtgaattgagtatcaggtatattattataaatacatagaggatgtaaaaatgaaaaagacgatatggaaaaatccaaataatttcaatgaattagaagttaatgagaattgtttaatagacaatagaactggagaacaatttattaaagatgaaaatgaaattattcaatttattcaaaaagaggaaatagatggttcaaataaaaagagtacagatttttataatagttttgcaccattctatgagataggtcaaaagatttggtatagtttttttggtggagaaaaaaaggcaagaatggattacttaaattatcttgatattaaagacaatatgacagtattagaagtatctattggaacagcagcaaatgtaaaatatctaacaaaaaatgcagattattacggaatagacatatctatgggacaacttcttcaaagcgtaaaaaataagaataaatataagttaccgattacactatgttatgcaaatgcagagagtttaccatttaaagataattcatttgatgttgtttatcatattggtggtataaacttatttaatgataaacaaaaagccatttatgaaatggttagagttgcgaaaaaagacgctaaaataatgatttgtgatgaaacagagaaggttgcacaaaaatatgagaaactgccttattttgggaagccatttaaaaatagagaaaaaatagttccacctattaatctgttaccagaaaatgttgaaaatataaaaactatggagataagaaaaggaacattatatattattacttgtaataaaaaataattttaaaatatgtaattaggattttatgaggcgataaaacgtgagctattaggacatatgaaagatttttagtttttaatataccttttccatttatttctatattagatttatttaaatatcatagtaattattttaatcattcaaagaagattgttattgagttagatgaaaatataacaatgtataatgaaaaaattgaaacgataaatatttatattgataatgaataacgaattataaagaaatagaattgaacagcaaattcctatcataaaggtttgcaatgatattaagaggaaacgatatagaaaatcatgttaatgataaaatagttattattgttttttaagagaacaaaagaaagttacagaaacgaaaataagcttttacttcatttataaaagtctactataaaatgaaaaaacagggaactataataaaatgtgaaatgtcctcttgtttttaaatatcattttctcgtttataagatgccataatagagttatcaaaaagatatatgagaaggagagaaggtgtttttttgaataagtctttgaacaaaaaagtaagtcaaattatccaacagagaaatctacatagtataatgaacaatacaaaatggacagaacttatttcttcaattattcaagaaatgccattcccacccgcttttgttattaaatatctgacttctgaaacgaaaccatcaatagatatgatggcctgccattattacggtgactggacaggtgagaattttccatctgtagagtactatttcaatattgaatggataaaagtacagccacgatattataagcatagaggaaaacttgttagtccagagattgttgatggaagcaaagaatttgaagcgattttagataaatgttacattccttatgaaattgacaatgaagtctattgtatttatggatataagtaatgaagtgataatttctatttagcagattattaggtgtccaaatatgaacaccatttttaaaccttgtattccaataagtaagatgagataataaaattaatgaaagaataaatgagaattgatggaggttcttttatggatgatatggttattgttgtcataattgtaaatctgatatattttgtaatttggataggtataaataaattacgaaactcaaataaaacattcatcaaagaatgggataatggcaatgaattttatgaatctttaagtgagaatgataaaagaatatactggaagcaagatacacatattctcaatagaggtttattaatattttttccatttatgaatttagcattatttctcattgataataaaaattattattggataatttgtttagtaataggattgattttatcatgtattttaggtgtattaatgtcaattaaattaaggaatagattaaaatagaaaaatcttagtttcaactttagtttgtctttaaaaaatttaggattttcattacaagacaaaaaaataattgtattttgtaatgaggcttctccgcttgacgatgaagcatttgaggaaataaaagaacataatatgaaagatgatctcaaaaatattccttgcttttattgcagaggtggatgggattgagatgcaatgagttttatagatagaaatatgttaaactgttaagaaaatctatattgaaaaagggcccaaatgaattagaaatatgggaaaaggctttgttgtctgcgggcaatgaaaaatgtgattggacagacaaagaatatctaaagccagttttagaagcaataaacaaatagattcaataagaaaaggggatttcattgtgtttgagagtattgatgttaaaaatggaaaaataactttttgtgatacgggtgactatttaaaagaagatttatttcaagtcatatatccaaatgatgttattgttgatgttggatggtataacggtgttcatggttttattattttggtcatttcttcgtttgattgggaaaatccaataataaaatatgttgtttgcgatgaaacaaaaatgcttttagttttacagaaagtaattgataaaatagctgagaattagaatttatgaaggaaaatgacaaaaatgaaaacagtaaatattttgaacgctttgaggttgttgaagtattataataagtaaattgtttttatgcagtgcattgattttttaggctaatagtttattgaatatagaaaaattaacatttggctaggagggataggtttgtataatcgctatgaagatatttcaaagttcattatagatatggatcaactgtgtgttgcagatgatgggtatgtatatgtttccaaacaggaagattataatattgcagtagatatggaaagctcttatggctcacttgatgaagtaaagtcttttattatttatttagtgaagcatatttgtgaactggataatctcgttcaacgttttaaccagaaaaaaagaattaaagatggtgggcgtgggtatgtatgtcttccaagcccagtaggggttttacgatttgattattcacagagcatagagaatgatcctttcccacaagaaaaagagttcccttatgaattagaaattatttatatggaaaaccccaatagcattgtatttgattactggaatactaaaaattgcaatcaacttgatattacatttgaatataaaaaagataaatttttcttgcgaaagttcggttttattgattgtatccctgatgattgggaagaaataaattctaatttatagggttaaatacaatccattttcctatttagtgtaatgttaatttatgttgcttgtcgcaacggtcttttctgacatataatggcggtgaaaggaggggatcaccgatgctaaatgaaaacatcaaagcaatcagaaaatctaaaggactttcacaagaagaacttgccatcaagttaaatgtcgtgagacaaacaatttctaaatgggaacaaggtttgtcggttccagatgctgatatgttaatttctataccagaagtatttgaaacacctgtaagcatattacttggagaaagcgttgacgagacaagggctgacgacttaaaagtcatttcagagaaacttgaagtcataaatttgcaacttgcgcataggaaaacaacgattcaaaaagtgattcattggctttttattttgttatgtgtagttatagtattcattttttctattctaataacattgaatagtccttacttaggttgggattatagcaatcctgaaacctcagttgctggagtcatttttcacgcatttgagtggctgtttgttagaacagcaccatttgctttgtttggagcaattcttgggatttctatgacacgaaagaaagtgtgaaactatttagacttaaaaatgtattttgagagattgttaaattactatttgcatagtgatttaaagataaaggaggataaggttatgggaatttggatgattaagtaatagcaaggagtatctaagctattacaccttgctaattataaataactaaaataattaggaggtataaatttatgtcatattttcattatcaagataaaaaaatttattatagagaagtaggtcaaggtaaaccactcataatgctacatggtgatgctgtatcatctgtcatgtttgagatgttattaccattatatcaagaacaatttcatgtcattttaattgattttttaggcaatgggaaatcagatagagttgacagtttaccatcaaatctatggattacacaagctgatcaagtgattgctttgatagaacatttgaaattaaaaaaggtaaatgttttaggaacaagtggcggagcatggactgctataaatacagcattaaaaagaccagaacttgtcaataaagttattgcagatagttttgatggaagaagtttagatgatagttttgttgaagaacttctaaaagaaagaacatttgcaaaacaagatgttgatggaagggagttttatgagtggtgtcaaggggatgattgggaagttgttgttgatctcaacacgcaagcattagtggaatgtgcaacaaagaaagaagcactatttattaaaccattagaaacactgaaagttccagttctttttataggtagtcagcaagatgatatgtgtagaaaagatatgtatttggaatataaagagatgagtgaacttgttgcagatggaacgatatatatgtttgattctggggcacatccagctattgtaagtaatgctgaacaattttcaagtatcgttttgaagtttatatagaaatcattataaacagaaaacagttagtcaaaatgaagtgactaactgtttttaaattaaatataattttgatatgttaaggtgccttaaagtcaaatagttttgtattcaattaaaaattatatttgaaagttattaaaaaagcaaagttaagatcatgaaagtttaatgataaaatcatacatcgaaatctctttttttacaatatgtccacaatataattttaacagacgaaatatctccttttaataagaatatcccgttttaaaactaaagacagaaaaagagggctcataaatatttaatatacctaaaaagaatttctttccaatggacactagtgataagtttaatttaaataaaatgtagttcaaaaaaagagggattggaagaatcaaattcattttaaatgcttgttaccataaatttggtctcatattataattttattttaacttatagaattatattttaacatcatcagtattaaaatataaaaaaataagttaaaaaggtgatgctatgaatgcaattgaagtgctaggattaaaaattgaagtcaatgattggaaatataacaatcatttaccattatatattactaatacatatacaattaaaaaggtattaataaataatgtatatgctcttatgcttttacctaatgaagaattaccgaatactcctgctttaaaaaaacatatttcgagaatacaaaatatagaaaatttacctgtgtttttaaaacttgagatattatctgagtacagaaaaaataatctcttaacaaatcaaattccatttatatatttagataaattaatttatctcccatttttagggacggttttagctaaaacgaatttgaactcaaaaaaaccaattgaaaaattcacattatctactcaacttttatttatctggattatgtatcaaaacactgataaatattatatatcagaagcaatttctaaattaaatttttcaaatatgacattaacacgtgcatatcgtcagttagtaaatagtggattattttatgaagctaaggatggtagaaaaatatatttaacatctatttatagtaagaaagaactttttgaaaaagcaaaaccatatttgacttcacaaattttaaaaacaggatacataaataaaaaaattttaccaaagagaattttgtgtggtgagtctttattaagtgaactttcattattaactcctccaaggatagcagaatatgcagtatatcataataagatagataaattgttgttaacaaatgaattaatagatccaaatgaacaagttaaagttgaactttggaattatgatccacttttattttcaaaggataatgagactacagatatcatatctttagttatctcattatttgaaacagaagatgagagaattgaaattgttcttgaacaattattagaaaaaatataggaggagaaaagtttgtgataggaatagagaaatttaaataatattttagtggctatgaagatcaatatgttattataggtggaacagcttgtgaattattaatggaaaatgaggaactggattttagggctacaaaagatatagatattgttattattcttgaatccttaacaaaagaatttggaaaaatattttgggattttattttagaagctggctatcagcatattaataagggaacagggaaagcgcaattttatcgattttataagcctaagtcatcaaattacccagctatgatagaaatattttcaaaaaatcaagattggatatctttagataaaatggaaggaattgtgcctattcatattgataattctatttcaagtctttcagcaattctattaaatgaatcttattataattttttgataaatggaactggtgttattgatggtatatctgttttaaatgcagaacatattatcccatttaaagcagaagcatgataagatttaactgaaagaaaaattaatggtgaacatgtggatagccgagatataaaaaaacataaaaatgatgttttagagttattgtatcaattttataaaattagagaaatacaatatataagataattgataaaaaaagcaatgataatgagttagtatatattattctttcataagaaaattatcaattttatctatatttttttatcattattagctattaagatgaatcattaacgaacatgaagaataaatttatatttttattctcttagattattttgctttattgcaatttatcaatatcatgtttaataagaaaagtaacagaccagtcttgcatggttttgttgcttttttatgctacaacaatgagaaaaagccaaaatgttactatttaataatttgtgtttcggtttaaaagatgtcataatgaagtatataaatttaaatttatggaggtaaatatgcttattaattttaatgaaataccagaaagaactgcaccaggaatgaacggtggaacaggagaaatgacagcaaagatgtttatggataatgatggaaaaatcattccctgctgtattcatatgggaggatctattgggttgcatagacatgaaacaagtgatgatatcaactatatcatttctggtactggttatgctatttgtgatggaaaagaagaaattcttacggcaggaacttgtcatatatgtaaaaaaggctctgaacatagcattgtcaatacagggaatgaagatttagttatgattacgattgtcgtagagcgataaattgttagtggatatataaaaaaacaattgagagtaatgtgttttgaaattgagataaactaaaatttgtgaggaaaattctatgattgatgtgttaagtcatttaaaccatatatttcaattagtagcagtcgaaaaatcttctgatgaagaagcaattgcaagtttaatagcttcttcagaaattgcagtgccagatgaatacttaaacttagttctaaagaattcagagtttgaatttgcagtatccaatactcaatatatacgtatatggggagcaagtgggtgcatagagatgaatgaagcttatcatattcaaaaatatattcctcaatcacttgctatcggagatgatgagggagggaatgctcttatttatgctacggggcaagaaggatttggtgtttatgttgtagcatttaatgatcttgatattgatgagatgaaatacgtttcggattcattgacatcattgcttgttaacggaatgggtgttgagacattgataagtatataaatatgaaactattttgaacaatttgaatactgtttattgtcttgtgttattctttataaggtgtcataatagagttaacaagtcattaaattagaaatttgggggggcactatatgagtatatataagtcgcaaaaagggcgtgaagaatcacttttattgtatgataaacaattattaaaattaggaaagtctttttcagacatttatgtagagacatcatttggaaaaactcatatagttgaaactggaaataagaaaggaatgccattgcttgtttttcatggtgggaatagtacaactgcatataatttattgatgtgccgatttttattagaggattttcacatatatgcggttgatacaatcggacatccaggaaaaagtgatgaagtgtgtttatcacatagaggatatgattatggaaagtgggcaagcgaagtcattgatcaattgggatatgacaaaattgcctgttttggtatttcatttggtggtggtgtattagccaaactcatatgtgttgcgccagaaaaggttaaaaaatcagttttgattgtgcctgctggaataagtaacgctttgcctatctcatcagtaaaaatgatgatacctttattacaatatcgtatgacaaagaaaaagaaatatcttattaaaacagcattatttatggcattacatgaggatgtccttgatgaagatactttagatactgttaaagatagttttgataatgtgaaaacaaaggttggaatgccaacaaatattgaagaagaaagattatctggatatcattcacccacacttgttattgcttctgaaaaagactgtttatttcctgctaaaaaggttttagcaagagcaaaacaaatttttattgattgcagaatttatgaactaaaagaaagtggacatatgcatatcttgccaccaagtattaaaaatatgatagtagagtttttaaaagaatcatcataaaatcttcattttatgttttaacaatagcatgcttgaatattgagttaaaatttgttgatatcatattgtttattgaaacaggatagtaaactaaccttgaccggtgagttaccatctttttctaaatatttttatttatacaatattataataattcaaatacttacaaatatttaaagaaatagaaaaagaatgtgtagtccaattaaaactacattaaattttaaatagtcattatatttatcttgtttaaataaattgaaaatgtaatcataaatagagaaaatctttttagcaaggagaaaatagatgagtcattatgtaattgaaaataaattaactaatctcataccaatcgtaaatccaggtttaaaaggaaaacagggaattgaagcagcattactttatagaatccttccctgtaaagaaatagattcatcatatttagtaaaagaagcatatcaactttactatgatgaacctattccagcttattcagatactatattgaatgcatttataccatttagagacttttgtgtatcaaaattattattacttagccgagatgatagaacttattatccattaaaaaatggaacatatagaaatgatttaaatgaattgatatacttatatttagatgatatttttaatggatatgaagatttaagacatttgtttgatcgatattttgatcttatgtattctttttctaatttcatgccagtgcctgcttgttttaatggaacaaaaacaagaaaaggaaaaggtgattggagactcaataaagattatccatcaatgtatttaaaaaatcttaacgatgaaaattctcagatttgtaatcgaattgaaaataaacaatggctagatgaaaatatggaaaaatataaagtaaaagctatgtatagtttacaaccaccttatgatattaatgaatattatggaaacaacgatgataaattggatatgttaaaagaatttattatgcaagcaataaaattgatagaaaatagattaaaataagactatgtttaaatgggggataaaaatgaattttgtatttttgctaagctcaatctttttattaatattatcaattccgctattctttgggaagatgtcaaatatcattgctggatataatacaatgaatgataaacaaaaagaacaatatgatgaattaaagttatgtcgaataattgcaatgataattataggattagcgattatattacttttaggcgctttgtatataatcagttcaactaatactatattagtaggtatatcagaaataatgataggagtaattgtcggaaatttttttgctaaggagaagtaatatatgaaaaagatttattctgtattaacgaataaatctttttcattttcaaaattttctctttttaatgatattttaatatgatttaaagatgaactatctagctcataaaataacttataattctttgacatagcaaaaatacttttctcgatattgtcaatttgtgaaataatatcatcagaacaaaatatttcgatcatagtaaaacaagatttttcagtaatataaactgtaagtttagaatgagcatttaaacaatcaaagacaatatttttagaaatataaaacattctatgatttaatgcgtcaatttcatgtttgacattttttattgcatttatttgttgtaattcaaattttctgagttgttgtgacttttcaaattcaattttattaagtttattaagatgatataatttctatataaataaataggaggtaaaaatgaaattaggatattttgtttcaaaaaagattgatcagttaacaaaaaaagcagatagtgccatgcaatgtggtgaatatttaaaggctattgcatattataagaaaataatagagatattgcctgaacctaaagaacaatgggaagcattcgagtggagcgtagtatctattgctgatacatattatattatcgaggattataataaagcagagttatattttaataaaattataaatacagcagtaaatccttttattttcttaagatatgggcaaacacaatattatttaaataaaatagaagttgctaaagaatatttaaaaaaggcatatgaattagaaggggaagaaatctttaaacaagatgatccatgtttcttgaaactagccattgaatctagtaaagcaacaaataaaattaaagaaaatgatgatggttttgagaatctatttaggttacccctagactatcagtatctggaaaaagaatatatgagtttacaatatctttggaaacctattgattgggatgaaatatacaatcagtacaatttattctttgagaaaatcccagaagaactatattctaattctatatcatttctttgtgcttctgcgatactagaatctgcaataaatttaggtaaaacagaagtgtttgaaaaatggttaaacgtgattgaaagactgtcacagaacagaaaagatgttgaagtggtggaaatatggaaagggatttgtgaactttataaaggaaataaagaagaagcgttgaaattttttagattagcagaagaaagaggtacagatagaatattgaaacattttagacattttggtaatgatatatatgatttttatttgaaaaatatttaagaaccaattcttattgtatttattttttaaagatgtcatactatgaaaaagcataagataaagtgatatctggagagggcatgaatatgaataaagaattgtatgatatgatattgaaaagaaagtcatttcatttatttagaaatgttggaaatcataacatttctatagatgagattgaaaaaattaaacaaatgtatgaaacttttgtacctttgtaccctgatataaaaacaacaatcaagattgtaccagccaatgaaacaacttgtaaacgtggacaacagttttgtattttgttatatagtgaaaagaaagataactatttacaaaacattgggtatcttggtgaacaactagatttatatttggtttcacaaaatataggaacattatggtttggcattggtaaaaccaatgaaccatcatttgaaggtcttgattttgtgattatgatagctatgtcaaaaattgatgatgagaaaaaatttcgtaaagatatgtttaaaagcaaacgtaagactatggatgaaatctggcaaggagaactgatcagtggtgttagtgaaattgtgagatttgctccgagtgcctgtaatacacaaccatggattgtagaacatgtagataataaactttatgtttatcgatataaaaaacctgggaaaagaggaattatgccagcagataaagttgtattttataatcagattgatatgggaatattcttatgctttcttgacttatgtttacaacatacaaaaaattcttatgaagtaacattatttatagataacggatcacaagaagaaaaaataatcaatgcagaatataaattgttataataaatttatgaggaggacaatgaaatgaatttatttggtttaaaaaagaaaaaggatgaaaattttgaattgaacttaatcaattatttcaacagtaaaaatatttatccaaatccagttcaattattattgccagaagcagtaggattattaaatataaatgaaaattggaaaagtatattatcaaattgttcaagaaaagaaagagttcataaaactattgaattatggaaagaatcaacaagtcagtttagtaaaataatagatgtattcaaaagcaagttaatatctatagatactatcctttataataaagaactctatgtggtatattctttaaaagcttatgatggtttgatttattacttaggaaaattaccaagagaatcatatgaaaattcaataatgaataaacttcctaaagaaatacaagatttttatttacatattcatgatggttttattttattccctgatgaatgtatgggacctgtgagttcagataaattttattgtttaggggatgatttattacaaagtgaatttttagatgattattctgttaaagatacatatatgatcttttcaaatggtggtggcgatggaattgtttatgatttaagtcaaaatccacctaaaggattcacttattttcatggtaattatgaggattgtgactttgagaataatccaattgatgtgatgtgtgaatggatgaaaataggattaaatggtgaataatagatttatttcaataaggagcatggatgaatatgagagatagtcttaaaagattttatgagtatttagaatctgatgaagatttaatgtattgtgttcgtattcaggtggaatggaacgaagaagcttttctaaagatgaaacgattatctagagaagtcatgaaagattatgctcacgaagataattatccaaaacgatttattgcttattttatgtgggaaattcctaccattatcgatatcctttcacagtttaaacactgttcaaaaaaagataaatcaaaaggatatactgatgaaacatatcacataatgattacagaaaaaatcgatcaattaaaaaaactccaacaagagtttataagttcattgaatgtgtattaagtactcatctatgaatttttgtttgttggatatgatgttcatatttgaacatctttttatttacttgttttcatacttagaagatgtcataatttaaaaaagatgaatagttaagctttaagaaagttcgtaaaacaaatgaattatcaataacatgaaatataaatgtttttaaatcacaaagaaattttaatatcataaatataaagcaataaaacactttatagaatcaatttaagatgatttgcaactataatttgcgcaattgagtgtgtatagtaggtcgtatgcaactttaagaaaagttatgattgagttacagtcagaaacgactgaaatatgaaggaggataaaaatatgagtgtatcaaaacaacttattcatttaagaaatgtgaagggtatttctcaagaagaattggcttctttgatgaatgtgacaagacaagctgtatctaaatgggagacggatcaagctttaccagacagtgaaaaaattattcgtttaagtgagatttttggtgttaccacagattatttattgaagggaaaggaaaatgatccaatcgatatttattcacaacatgattcaaaagctggaacagatatgtcagcagaggttacagaaatcatagataatgttcatcagatgacaacaacaaaaagatgtttaatcggaatagggattttcatttttgtagtcattgttattgtggggattatctttataatgaaaatgtaattgttatttatgaataagcttttattaaaacaataaggtgttcatttggacaccttttttcttgttatctcataataacaatgtcataatataaaaaatgaagtaaataaggatattcttcaaggagaaataaatatgcgaagaaaagatagagaagttactgattttcatgaaataattggtattatgaaaaagtgtgatagttgtattgttgcgatgaatgatggggattttccttatgttgttccaatgaattttggattagaagttcagggagaacaagtctttttatatttccattgtgcaatggaaggaaagaaacttgatttattaaaaaaagataatcgtgtcacatttgagatggattgtgatcataactttattttatatgaagaaagaatgagttgtacaatgggatattcaagtgttattggacatggaacaattgataaagttgcagatgaggataagtatgatgcccttaaaatattaatgaggcaatatcatgcagaggattttaaattcaatacagatatgatgaaagtcacaacagttttaagattgactgttacggatataacggctaaacgtaaccattaatatctattaatcatttaaaaagaaatgggaggggatatgatgacaaatgaacaaagagcagaagccttgattcaaaaatatggatttgattttaaaaagatttcgaaagaagaaatacgtttattaattgaaacagagattactcattttcaagaaggaagcagtgaatatttgcgtttattatgtggttatctttattgcataggggatatatctgatgtgagcttaattgaaagagccaaatatgatcttaatatggatgttggttgtatgattgaccaggaatggattgatagtttaaaaaatggtggcattgaagatgaatatgtcagaacaaaagatgaaattataaaatcttttattttctattataaaaattttaaagctgaagattatgaaatgtatttataaagagaaaaaaatgagcactttacgacaattcaaaggggcattagtgataggaataatgtaatatgaataagaaggatggaataatggatatggataaaaaagcaaaagatattttactaaaaacatattggtcaagttcaggatggaaaaatcaaccctatacagatccacttgattttgaatatgcaaaagctaaaggtttaatgtttgatcctatcacaataacacatgatgaatgtataaaaagaatcattgaaattattgatacaattaccctagaacaagttaccaaagcatttctatgtagtttatcaacacgtcgattggattatcgttcagcgattgcttcatacagtattgcaaaattattgattcctcatctatatacgccagttatctcaggacatttttatcaagatggagagattgcggaaaaatctcatacttgtcaaatctgtcgtgatttaaaatatgggattattggaaatgaatattatcaagatgttgatttaaatgtacttaattttgaacgtatcaaatggggtggagttcgtcatggtgaactcatttatattctttttgatttagaacaattcattaaagaagatattttagaaccgacaaaacaagattgtgaaatctttaaaaatatacttaaaatgattcaaacatgtgaacccaatgattatcccagtgtattatgtgagaaaatcaaagatattcctttctttcgatcaaacaaaaacgaaagatcaatgcttattgaaatattggcatgtataggaatattaaaaccgagttcatataatagaacagtaaaaaataaaaacgattggactttcgctgaattttggcgaggagaagatagctataacaaggagatagttgatcaatattttagtcaatatttattatcgtttaaggagtaaaagaaaatgacagaaaaagaagcaattgaaattgctaaacctattgttaaacaagttgtagatgctttgtcaaaaagaagatatcaagatatttgtcattatgcaaaactatatcagatatcattacaagcattgcaggaaacaattgaagaatatttaacattaaatgaattaccttacattgatgcatttgatgtcccttgtgatctttcttcaaatgatgactatcaacaacttgattgtgttgtctacaatgatggtagtggttttacgcttgattatgcattaacaacagattccaatttcaatgatttaactttacaaatggaatttatttggactgaagaagatattatagaagcaagaattctagatgtccatgttttataaaaaataattattcattttatgagaggaggaattcaattgataagttctatataccgaggtatattttggatcatatgtcactatgatgaagaaagttatccaatatttgaaccatttgatttactcgcttttaaagttgaatgtgatgaaaatggtaatatattagatcatacaattcaattaaatgcgaaatcaggaacatcttttaatcataaaatgcaatgggatcaattacctaaaaaattaacaaaaaatcattcttatcaatattatcctcgtggacgagtagaaataagacatggaaaagctattatctttttgaatcctattcttaatcaagaaatgattattgataaaatatgtttggaatttcatttgaactgtgaaaagataaaacaaattgaagtgaagttagatggctcttatcattatcattgttattatgatgatgcatcaatatattaaaaaggagaatttgtatgaattggaatcattatttattagaagaaaaaaatcccaatcatccttatgtagacttaggtcaacttgaaggaaccgttcaaggaatatatgacttatcccaagtacctcaaaagacaaaagtcttatcattaaaaatgccccttaaaaaatataaactgacttacagtcattatgaatcaatctatgaaaatccaaatatcgaagcagtctacttaaatgaagtcaatgaagaaatcatgaatcttttaaaaacacttcccaatcttaaatatctacatatcgcttgtttaaaacaagagtcaatcatggatttatcatcgctttctcatttagaagtcttgattctatcaactataacaaaactcaacaatatagactttttatctggattaaagaatttaaaaacattatatataagagattttaagaatttatatgatttatctccattatccaaattaacctctttacaagaattacatttatcaagtggaggaatgagtggagtaggaaaaccaataaaaagtgtagaaccattatcaagtcttaaagaattacaatatttattctttgttttagcaattgaaaataatgatatttcatcaatattttcattaaataaattaaaatatttaaagctgttaccacgttattatcaaaaagaccaactgaaattattacaagaaaaattacccaatgcaatgattgaataaggagatgattgtaatgatagaaaaaacaatttttccagatgattatggtatagcatttctttctgttgatttatttatggaagaaataaaaaagaaaaaatgtaaagcaagaaaatttatatcttattttaataaacatatggatatttattttgaattgattgataaaggaattatagttccgtttcatcctgttaatgcaggtgatgttcctatttttatagaaacagaaagtcagaattttgtgtgtcctcaaggatatcaaaaaatatttcaatatgatgatttttatttaaaggttggaccacaaggtattgtgactctagctagttttggacatctagaatattatggaaagaatatagctggtggagaaacaaaacgcagttattttgatttagaaggtaatgagagctttagtgcaatagattttcctcttgctcagggagaatatcagttttcattgattgctcttaaaaagattgatagaactgaatatgaaatcaaatatgatatgggttatgcttatggcttttattttagtcagccacgggatatgattaaggataatttagaaaaatgtgatgatgatcactatgattttcgtttgatgtcatcaaatcagtgaggaaaaatatgcgtaatgatgtagaaaatattattaaagaatttcatcttgatcgaaaacgtatttttgaagtctcaaaattcaaatatgcatcaattattcaccaaatagaaaagacattcgttaaaaatggtcaacatattcattggtctaatatgggaaatggatttcaatctcaatggtcttgtgtttataaagatatcagtcaacaaatgaactggtatcacttacttcctcaaatcattttagataataaagaacccatctatgttctttttgaagatacagttaattatcaaccaaaatattggctttatgaaatgtatattccagaactcattgttgtgattgataatagcaatcctgatgatttttatcttgtttctaaaaaatatgattggttaataagtgagtgtcatgaagaagttgtttgttttttaggcgataagcttaactatcaagttataaaataaactgaaaggaaaaaatacaatgttaacaatacaagatatgtttcaaaatcaatcaaaaatagatgaaggtgtattggtggaagtttctgatcaattatggaaattaggaagtctacaggaaataaaagaaaaagtaagtgaagatctttttgtggtccatgttgggataaatatgattggaaattggaaaaatgatggttggtggtgtttgatatgtgaacaggcataccttgtgccttatattccagatgtattaaaaatctttggtttagaagaaatgaaaactgtttttgaaagtattatttctttatttccagagtatacaactttctcaaatgaagatgaaagttattatgatattgttaattttttacagaatgttcatttcaaagtcaataatgaaagattaaatcatataacaattgaaaatcgaaaagcaatagtaagattaatccatcaaagattagatagactagaagatatcactgatcctttatggggttatggaagtcaaaatgatgggtggaagtcagtatttgattttattgctttaaagatatagaaaagtcgaggtattcattatgtatgagggaagtagaaaaaaacaacgtggtcaaaaacgtaagttagaaaaaatgttttcttatattgattgttttgaaccttgttggaatcaggatgttttgtatgaacattttcatgttccaagtgatccatttatagaaagggcaaaaacatcaaatcaagtgaaaagaagcttttatcaaaaatggttatccacaacaaaaaaatttattgaagaaaaaccacaagatttaaagttttgtaagattgttgctttattatcaattcctaatctttggagcagtgaaatcattatcttttttgataaaagttattatgagtctttttttgaacgtcatgacgattatcaaaaatggattttgatagagaatgattcatttgcaaaaagacaaagtttaaatattgatctttgtgaaatgggaataagacaatttataaatgatgaaggtgacatatttactaatgaattgtggttttatggtgaagttgtagagtttatttcataatcaaatatttattgatgaagggagattaaagttttatggaattacaattttatagtgttgctgtttgttatacgaattgtgttgaatcacttatggatgaaatgcattcacttgaaaagttggctttgtcatgggattttccttatgatattgcaataactgtacgttgtggcaagaatgtagggcgaacatttcgacgattttatcaaagagaacagactttaatgcttgatattcgtcaagaagatagtgattatatggttctatctaaaaatgaacagagagaacatttaggaaaattgatatattcctacttaaaagaaagtataaaaaaatatcccaagtttgcgacaatatcccaacaagaatatttgataacaaggtttgaacaatggatgaaagaaaataattggttagatggtaaaattgaaaaagcaagaattatgttagaggctaaccaagatacaaatgaagtagctgagactttgaaaatgtctttagcagaagtagaagatatccttattcatatggatgaaactgaaaaaagagaagaaatacattcagataatcaaaaagctataaaagattgtaattggacatattaaaaataaatatgctttttattatttaaatacaagtcaagacacttttaaaaaagtgtcttttaaatttatataaaagtgataaacactttttattgtgactaatttgtgataaaataacaaaaatgaaaggaaattcaattcatctttttgaaaggagaattttatgaaaaagcatttactattatttattaattcacttttggtattaatattagtgattggttttactttaactgcttttatgagtcaacaaacatataaaccagtaattgaagatgatattgaaaatatctcaaaattaacggcatctaatatttatgcagaaattaagggagatatgatgaaaccattatttgtggctcaaacaatggcttcagattcatttttaaaaaattggttatatgccgaaaagaaaaatcctcaagatacaaatcatcaaaaacagatgaaagaatatttgaatacatatcgtcaaaagtatcaatatgattcggtttttacgatttcagcatatagcaatacttacttttattatgatggggttaataaggttgtcagcccagaaaatgaacatgatgattggtattatgattttgttgatagtcaattaccttatcgtttgaatattgatacagatgaagtgaatgctaatgaattaacagtttttgtagactgtcgaattgaaggtaaagatggtgaatttttaggggttacgggggttggagttaagatgagtaagttacaagacttacttaagaaatatgaaacagattatgatttacaagcaatccttattgatcaaagtggaaaaataactgtcagttctgattcacataagatagaaaatataaatgtttttgatgatacgattttaaaagaatttaaaacccagattttagaggataaaaaatcatttcaaatgaattggtatcctcaatcagaggcaaatcaatgtattatttcttgttatgtagataatttaaattggtatttgattgtaaccaaagatacacagccattacgtacatcatttcaagaattaattaaaaaagatattttcattatgatgattatgttagtcatgttattgatgttaattacttttattattcgttggtataataaacgtttatcattattattaaatattgatcatttaactggtttaccaaatcaacaatcttttaaagaaaaatttgaatgtcttaatgaatcagaaaaatgtgttatctttatgtttgatttagatcattttaaatctattaatgatacagatggacacttagaaggtaatcgtattttatcccaaattgcttctgcattaaaagaatcaatgaatggttatggaattgctgcacgttggggtggggatgagtttattggtgtttttaaatgtccattatcaaaagctcaggatattttacaaagaatgcaacttcaacttcaacacgaatgtcattttagtggcggagctgtcacgataagtattgggatgactgagattttagctgatatgagtttggatgatttgacgaaattagcggatgaggctttatatgaagctaaggctcatgggggaaatacaatcgttataaaataaaaagtagctacggctactttttaattacatttgaacataattctttccatttcgttttgcaatatagagacgttgatcagcttcttcaaaaatatcttttaaagattcaaatatattttctctaaaacaacatcctatagaaatcgtaaaatgaatatctttatcaccaatatgcaatagacatgattcacattcataacgaatctgttcagcaatttgataaagctgttcaatggttatatcatttatcaataagataaattcctctcctccaaatcgagcaataatcccgtgttgtttatacttatccataatttgagtaacttttcgaatcacttcatcaccttgaatatggccataagtatcattaatgactttaaaatcatcaatatcaatcatcaaagcacctattgattgatgattctctttagcctttaaaagcatactttcaccttgttgcattaatgcactacgattataagtccctgtcaaataatcaaaacttgcttttaccaatgcttcttcaaaacgatatatattttgtaatgcaatagcaacataatcagcaaaaacctgtaaaagactttgatcagtttgactaaaaaagttgatttggaatgaaccaaaatagataactgctaataaattattttgataagttatcggctgtaaaagaacagaacgtaaattcttttgataaagctctcctaaagcaatacaagttgaatcgccttcaagaatatttgaataagtaatagattgtcgctcatctacacacttttgtaataaagaattttgagatgaaaaaatggtgttatctaaagatttaaattctgttttttgttcatcatagagaagtaaacgacaaatatcaaatttaaagatttgaggaagtctttctttaataacgtcaatcaattgatttcttgttaatgaagatgttacgattttaccaaaagaagtaatatcaagtaatctttgatataaaacttcatacgataacatccgattcttttgccaaacatcttccaattcatgacgatacatatcatcaataaacctgacatattgatgacttcgtatacgcgcttcatttaaatgcttgtaagcttctttatattgtccttgtttagctttaagaaaagacatttcttctcgaatacgcaatttatttccaagtaaattattaaaattatcataaacaatctgataatagatttcagccttctcaaaatcttccataaataaataataacgagcataaaccaaataaacttcagcattatccaataaatcattatcttcaaaagaatatgtcttttgtaaaacttcaaaacaacattttgcttcttcacgattttcttctaacatagcaatttcaaccgaaaacttattaaaaatctgaagattaaataattctgattgttgcagataaggagcatactcctttaaaatttcttttgcctttttaacttcttttgcactgatacataagttcattaataaaaagattgtgacaatataattactatcaccaataatatcatgcttttgtaacgtttcttcaacttgctggatagcttttttataaagtccaaactcagctaaaataattgctccattatttaaaaaagccgaataataagttattcttccattcttttcagccatcggcatggctttaagaatctccatataagctccaccatagttttccttaagaatctccaccagaaccgcattattagcaacagttaaaataccttccatattttcataaccaggaatttgcataaatagttcacgggctttttcattataggcaatggccttatctaaatctcttgtataataaagataaaaccacatcgcataacctaatgctattgaataggtataattttgttttttagcaatggcttgaaattgttctaaaattggaaaaagttcatcttgtaaaccaatgttttccaagactaatctttttaattttgtattaacttcttctgttttttcaaattgttcaaaatattcattaaaagttctttgtaattcttctctcatcatataatcctctaatcatatttctatcatacactatttttattttgaaatatagcgaaagcaagaaattaatcaaatattacttataaaaacgaataaacattatcacatagataaataattattgattgttttggaaaatattcatcttatgataagataatgtctatggggacaaaggagtttgtgtatggtagcaacagtgattttatttttattagttgtcgttatgggattttatctcatttattatctttatgatatttatcaacatcgtgattgtttagaaaaacagacctcttgtgttaaaacaggagcttttggttttatttgtttgttttttgatgttttagggattggagcatttgctccacatacaacactttatcatcgttttcatcaagttgatgattatttaataccaggaacgcttaatgttggaaatgctattccaacaattattcaagctttaatttttatacaattagtgaaagtcgatacattaacacttgttacaatgttattgtcatctgtaattggttcttatttaggcgcttctattgtagcaaaaatggatgaacgtaagattcgtttaagtatgggaattgctttattgataactgctttgtttatgtttttaagtgccattggagtgatggatattggtggcaatgctatgggattgacaggtataaagctttttgtagctattgtgattaattttatcttaggagccttaatgacagttggggtaggactttattcaccatgtatggcattggtttctttattaggaatgtcaccaacgattgcttttccaataatgatgggttcatgtgcttttttgatgcctgtctgtggtgtgaaatttattcaaagtgggatgtataatcgtaaagcagctttgtcatctacaattgccggatcagttggggtattgttagcagcttttattgtgaagtcattacctttacaagttcttcgatggggagttgttgttgtggttatttatacagcttgttcaatgttaaaagcaggtttaaagaaaagtaatgaatagggcagatgcccttttttgattagagggtagttttattgcttttttgtcttgaattttatataatcccatctttgacaatttataagcaataaaagtcctgaacccaatgtgtataaagggtttcaggactttttggttctgtaacgaatatgcgtaaattattatttctttgtattttttataatatttctcattttctttttgcttgtaatttcataatcggttctaaatccaaacttataatgcagctcatcggttaattgtgttcttgtgtatgctggaatatatccgttatactgtgtgtcaaccaattccatccctctaattgtctttaatatttctgtagctgtatatttattgtctaatatattagccaataagcgatagatgatgagtgacataaagcacgttagaaagtgtgcttctatcctttcttgtttttgtaagtgtactggtcttgccttaaaatcagttttcatgattctaaaacattcttctatttgccatctttcctctgaaacattgataatggcttggatatcatcatcttctagattagtagatactgcatagaaaccatcgtacattgcttcattatctatcttctcttgatttaaatgatagtattcttcaacagcgactccgttttcatcagtcgttattttttctataaatctggatggatcgttaggattacgtgttcctttttttaattttccgttagaacgtatcttattcatcgctctttggacttgcttatctctaatcttcttttgataaatagcatatttaggtgaatatgtaataatcaatcgttccttgataggagattctataggcaattctttatagaatactctattaagattatcttcacaattaaattcaatatcatcaatattgattcttttagaactcttacttcccagttctaaaaatcccgtatgtctaagtgcgacttcacgatcatctttctttaatttttttaaagattgtgtaatgatataagctctattctgtatactattaaattgtttattcgtttgtgacgctaaaccgctgtcactgcagtaaacaaattgacctaattgaaaatccttaacgattctttcttcaagcggttttaatgtgacttgttcgttcttgtttccttcatataaatcaaaagccaagggtataccatcaccatccatcattaatcccatacctacgataggattaggtctgttttccttgcctttaccatacattctaaatccatcatcttcttcaatttcaaaataataatttgtacagtcataatatagcttactgccatctctcttcttaatgtaatttgtattcctgtaaagttcagattgtatatagtctgtttccttagaaagaatagataatgcacgataaatatcatgtaattcatatttaggcttttctaataaggtagaagcaaattcatagctagatcgtttactgctgggacatagaatcctagaatagattagatccgataagattgcatccaaatcatatttgaacttatatcttgctttaatgtttctacatatattgttgatttttaacttgtaataaatatcttgcagaaatagataaccgcaattatacttacgattactgtttggcttaataattctatcaggggagaaagcaatgatagtatcatgattatcatccttttctttttgagtaagttctttggcgtattgtttagcccaaatgatcaattcatcacgagacatattcttttctttacataagtcatctatcttacctaacttttcgtatgtctttgaagtacgtgaaccattagaatatatatctttgataatataaataaattcatagttttttgatttactgatactcactctcataatatagcctccaatacttataattccattatatcatatattacgatgaattacgatataaaagtaataaaaagttgacaaaaaaataaagcatctatcaatgctttttgaattatacacatatttaactgtcaaagacccgggcagatgcccttttttgattagagggtagttttattgcttttttgtcttgaattttatataatggagacgacaaataggaatgattgattttgagaaatatggggattgtttttggatagggaatatgaaagaggacagattatggcaaattatacacaacgagcaattatccaaacatttcaagatatgcttaaagaaatgccatttgataaaataactgtatcagctattgttgctagatgtgatattagttctaatacgttttattatcattatcatgacatttatgatttgttagatacatggctacatattagagaaattaaatattttgaagaaaaagatttgaatctttattggaaagatgctttaaagatgatttttcatgatgttcaagataatcctgatattgttaatcatatatttaattcgatttctagagatcgtatagaaaagtatgtttttgatactttagatgttattgcttttcatttggttcaaaaaaaagatgtggataaagtattaagtgaagataatcaacatatgattgcgagtgcatgttgttatatgttattaggtttcttgattaagtttatttggaatggcatgaaagatgatgttgatgaatcaattgaagaattaaatgatatttttgaaggaacaattgaacatatcattaataaagaaaaaaagaaaatagataaataaagggttttgtctaaattttgatgaatttaaatgatttctactaaaatagtagaaatcgttttttttcacagtggtaagtgttttatttatcttctatacttgaattatgaaaaaaacgtagatatcaaatattttttagatagatgaacctacataaaattcataaacaaacaaggagggtttattatggatatttcaaaaacactaaaaaaatttggacttgaacaggcatttcattacctttataaagatccagatacaaacatgttaaaacttatggattgggcggataaatttgcaggagatgaatttataccacaacgtaaacttgtaagagaggcaatgacagatccaaatcatccttactatccttttattcatcgtattattaatgatattgatccacatgttatgcaaacaacagccgttaacttctttattaatgctgctttagcaggttggccaaaacaagaagccaatcgtgaaaaatatcaatgcaatataccttggactattttattagatccaacatcagcttgtaatttacattgtacaggatgttgggctgctgaatatggaaataaacttaatttaacttatgatgaaattgataatattatttcacaaggaaaagaattaggaatttatatgtatatatatactggtggagaaccacttgtacgtaaagatgatttaatccgtttatgtaagaagcattctgattgtgtctttttatgttttacgaatgcaacattgattgatgaagcttttgctgatcagatgttagaagttggaaactttgtcccagctatttcactagaaggttttgaagatgcaactgatggtcgtcgtggtgaaggggtttatcaaaaagttattcatgcgattgaattgctgcatcgtaaaaaattgatttatgggatttctgcttgttatacaagtgcgaattttgattcaatcacttctgaagaattttatgataaattaattgaaatgggagtttattttatttggtattttcattatatgccagttggaaatgatgctgttccagcattaatgccaacccctaaacaacgtgaagaaatatatcatagaatcagaaaatatcgtgtggaaaaaccattgtttgcgattgattttcaaaatgatggtgaatatgttggtggctgtgttgctggtggtcgacgttatttacatattaatgcaaatggtgatgttgatccatgtgtctttattcactattcagattcaaatattagagaaaagactttgttagaaatcttacaatcaccaattatgatggcttatcataatgcgcagccttttaatgaaaatatgttaaggccatgtccaatgttagaaaatcctgaatttttacgtgcgatagttaaagaatcaggagcccattcaacagatttacaatctccagaatcaagtgagcatttatgttcaaaatgtgatcaatatgctcaaaactggaaacctgtagctgatgaattatggcaaaagagtcaaaatgataaagacagtgatgattaatcatctcaaatcaccaccactgaataaaggttgtggtgattttttaataaagaggaagtgaaatcatgcaaaccgcgattgtaactgatagtaatagtggaatctttgaaaaagaagcaagtgagaaaaatgtttttgttgtggcaatgccaattattattgaaggaaagacttattatgaaggtgtgaatcttgatcatattcagttttttcaggttttagcaaatcatcgcaaggtttcaacatctcagccgtcaccttttgaagttgaaaatctatggaatcatatttttgaacttggttatgatgaaattgtatatatacctatgtccagtggtttaagtggctcatgtgagacagcccttgctttagctcaggattatcatggtcgtgttgaagttgttaacaatcatcgtatttcaataactttaaagcattctgttgaagatgctattggattaagaaaattaggatataatgctcatcaaattaaaaagaggttggaggaaactgcatataattcaattgtttatgttggtgtgagtacattagaatatttaaaagcgagtgggagagtgacacctgctggggcagcgattggaacgattttaagtatcaaaccattattaatcattaaaggtgaacgattagatgcttatgcaaaagtaagagggacattgaattgtcaaagaaaacttattgaggctatgcacttggctgttcaagaactatcaaaagatggtgcacgtttaagaataagtgtgacaggtagttatgaaaatcaagaagatacagacaaatgggttgatttagtgagaaaatcatttgatcaatatgatgtagaatataatccactcacaatgagtgtgagtgctcatgttggtccatgtgcatttggtatgggaatcagtcaagcaatagaaaaataataaaccttaaaggaggtcaaatatgaaaaagtattttacatctgaatcagtgacttgtggtcatccagataaagtgtgtgatcaaattgctgataaaatactggatgaaattttacttcaagatccaaatgcaagagtagcctgtgaagtaacatgtacaaccaatcaagttcatatttttggagaagtcacaacaactgcaaaagtagattatgttgaggttacaaaagaagtcattaatgaaattggttataccgcaatgaatagaggttttgatgcaacgaattgccagattattgttgatttagatgaacaatctccagatattgctttaggagtcaatcgttgttattcatcagaagaattggataatggggcaggtgatcaaggaatgatgtttggctatgcttgctgtcagacacaacattatatgcctttaccaattgaacttgctcatgcgcttgctaaacgtctggaactcgttagaaagacgggtgaacttgcttatcttttgccagatggaaaaactcaagtcacggttgaatatgaaaataatcagccgttacgtatttccactgttgttgtttctagtcagcatcgagaagatatagatattgcgactttacgtgaagatattaccagtcatgtaattttacccacattaccacaagatatgcttgatcatcaaacccagatttttatcaatcctacaggacgatttgtcgttggtggaccagctggggattcaggattaacgggaagaaagttaattgttgatagttatggtggatatgcacgtcatggtggtggagctttttctggtaaagatgcaacgaaggttgatcgaagtggagcttatatggctagatatattgctaaaaatattgtggcgagtggattggctgatgaatgtgaagttcaattaagttatgcgattggattagctcaacctgtttcactttatattgatacatatcaaagtgaaaaagttcctcaatctgaaatttatcaatcaattttaaatcttgtagatttacgaccagcagctatcattaaacgttttcaattaaataaaccaatttactctagagtcgcttgttatggtcactttggcaacaatgcatcgactatgccttgggaacaaacggatttagtgaaaccattacaaaaactattaaataaaaggtgagggaaagatgaaagaattttataaacatatgcgaatatgctcaatcattgtgagtctttgtacattgatattaggaataattatgatcatcaaaccagatgtttcagcacttttgatttgttatgttttagcttttttgatgttagtgagtggtatttatgaaattgttcgttattttaaattgggtgttatgggtttgttttttcgatttgatttaggcttaggtctatgtaatttattaattggtctcttattattgattcatcctcatggtgtattgatttttctacctattgctattgctttatcaatgttaatagaaagtgtttttgatatacaattagcagtagaaataaaggattatcaaatgcgagattggtggttatcattgattttaggattaattgggatcattgttgcaattttattattgatgaatccaatggaaggaacaatagctttaattatcttattaggaatttcgttaatgattcatagtattcaaagtttatattttatcttttgtatttcacgctttgtaaaagattatgatgcagatcatatcattgaagcaaagtggaaaactattgataaatagaaggcaaccgtgaggttgttttttctttttctaatgatttataaaaaaaatatggaaccgatatcatatttttaataaaatctattgacaattatattgtaaagcgctatactacaatcaaggaaccggtaccataacgaagatggaggagaaaacatatggattatagtcaagatgcgaaacaaattgttaaagcagttggtggtaaagaaaacattcagtcagttgcgcactgtgcaacacgtttacgttttgtcttaaatgatgaagcgaaggttgatgaaaaagcaattgatgcaattgaagttgcaaaaggaactttttcaacaaatggtcaatatcaaattattattggagcaggaacagtcaatatggtttgtgatgaaatcttaaagattttggggaatcaagtgaatgaatctagtgacaatcaaccacaaaaacaagaaggtcattatgttcaaagagcagttaaattattaagtgatatttttgttccaattattccagctatcgttgctggtgggttattgatggggttatataatgtcttaagtgcaccattctttggtgatggtcaatctattatgacaatgtatccacaattaagtggtattgcctcaatgttaaatacattttctaatgcaccatttacttttttaccagttttaattggttttagtgcaacgaagaaatttggtggaaatcctttcttaggggcagcaatggggatgattatggttcaccctgatttattaaatgcttattctttaggaactggagctgagattccagcttggaatttatttggtttagctattccagcagttggatatcaaggaacagttttaccaatcttacttgtttcatttattcttgcaacaattgaaaagaaattgcataaagtgacaccaagctggttagataacttaacaacaccattactttctattatggttacagcatttttaacattcttattcgttggtccagcaatgcgtactttaggtgattggatgtcaatgggaatttcatggatctataacactttaggatttattggtggagcaatctttggtggattctatgcaccaattgttattactggtatgcatcatagctttattgcgattgaaacacaattaattgctgatgctgcaacaacaggtggaagttttatctttgtcactgcttcaatgagtaacgtggcacaaggggctgcggtcttagctgtattattattaactcaaaatgaaaagatcaaatcattatgtagtgcttcaggaatttcagcattacttggaattactgaaccagcaatgtttggtgtgaacttaaaattacgttatccatttattgcagcatgtattggtagtgcatgtgggtcagcttggattgcctttacaaaaacattagctcaatctttaggagcagcagggattcctggatttatctcagtattaccaagtcattatttagattttgcgattggattagtaatctcaatggttgtagcttttgcctttacaattattttaggaaaacgtcaattagctaaagaagctgttgaaacaactcaagacaatcaagaagttattgaaattgctgaaaatattgaaaatgatgcaactgttgctttaccattaagtggtgaagttaaagaaattagtgaaagtagtgatggcgtctttgctgctaaaacaatgggtgatggaatccttgttattcctagtgatggaaaagtatatgctcctgatgattgtcgtattgaatttgtatttccaacaaaacatgcgattggattaacaactacacaaggaatcgcaatgcttattcactgtggaattgatacagttcaattagaaggaaaaccatttgttacacatgttgaacaaggggatatggttaaaaaaggaacattaatgttagagtttgatattgatgaaattcaaaaatctggttattcaattgaaacaccagttcttgtaacaaatttaccagcagataagaaattagaaatgcttgtgaaaggtgataatcaatatggatgtgaagcaattaaaattactgaataaagaattatcaatgaatcaagaagaatatcaaaaaaaatatcaagaatatgcttctcaaagagaaaaagtgaaacaagatccatggcgtttacattaccatctcatgccagaaactggttgggtgaatgatccaaatggcttatgtcaatttaaaggaacctaccacatctattaccaatattcacctttcgatgttgaaggccaaacaaagttatggggacatatgacaagttcagatttgattcattttaagcaaggcgaaccagtcttgttccctgattctcgagttgatgaaagaggcgtctattcaggctcagcttttatcaaagatgatacaattcattatttctatacaggtaatgtgaaattaattgataaagaatatgattatatttatgctggacgtgaacagaacttagttcatgtagaaagtcaggatggttatcatttttctgataaagaatggttattaaatcaaagtgattatcctcaagaaatgagctgtcatattcgtgatcctaagatttatgaaaaagatgatcgttattatatggttttaggggcaagatcaatggatgatcaaggttgtgtcttaatctatgaaggaactgatttaaaagattggcaatataaaatgtgtatcacaacaaatgaaccatttggttatatgtgggaatgtccagatttatttgatttagatcaccaacaattcttactcacttgtcctcaaggtttaccacatgttggttatcgttatgaaaatgtttatcaatcaggatattttcctattgaaatagattttaaaaatcaaacatatacattaaaagatttcaaagaattagattatggatttgatttctatgctccacaaacatttgaagatgaacaaggacgtcgtattttaattggttggatgggactaccagatattgattatacaaatccaacttgtgaaagaggatggcaacatgcattgacaatgccacgtgtattgactcaacaaaatggaataattcatcaaagtccagttgaggaaatgaaagccttacgtcaatcacatattcaaacaactgtttcaaacttcaatgattgtcacttgaatggttatgtctttgaaatgcgtttagcaattcaaaaatcagatgattttatcttacaattaagaaaaggggcatatttaaaatatgaccaatcatcaaaattattaactttagcatttgaagaatgtggatatggtcgagatgaacgtcatattgaattagaaacaataaacaatatttggatttattctgatacttcagcattagaaatatatattaatgatggaagttatgttttaacaagtcgtgtctattcacttgaaaatgaagataatattcaatttataaaaagtcatatggaagcaactatagatttctataaactttcttctatcattgttaaataagctattatcaatgacaatagatatcgtaattatgatatttattgtcattttccttttgatatatcatgacaattataaaagctttcgatataatgaaaacatggaaggaatgatgactttggaatttcaagttgaaacatatactggaaaatatattcaaaaaacaaataatcatctttatattgcaccaagtgaagctttgaaagatattgttgctcattatacaattacttttcaaaatccaaatcattcgattggtgaaaatcaagtgcttcatcttattcctgatgtaagtggttgttttgtttttaaattctatgatcctttaagtattatggtttggggtcctacgactaaaatcgtaacagttaaaaatgatttaaatacgtttccatgtcgtttctttgttgaatttttaccaggaggattatatcaggttttaggtcaatctattgattcacttttggataaaaagattgaactttcaatcatgaactcaaagctttatcaaaccataacaaaagccattgaacaaatgaatacatttgatgaaatggttgactttattgatatgttgttatgtcgtgaagttgccaaaaataacattcctgaaattattttagaatctttaaaattgattgaaactcatcatggacaactttctattttagaattaaccaatcaattgcataaaagtgaacgtcaattaaatcgttattttcatcaatatattggtatgggaataaagaaatattcaagaatagttaatgtaaatcatctgattcaagaaatcaatcaaaagaatttattagatttaacatatgaatatgattattttgatcaatcgcattttaatcatgtttttaaacagatttgtgaaacaacaccaactcattatcttcaaaacatgtccgatttttacaatgaattatataaattttcattaaaatagaagataaggaggagagctatatgattgaatcaagatgtggtataaaatgtagtgaatgtgaatacaaagaatcaatgggatgtcaaggatgtttaaacattgtgaagcctttttggggtgaagcttgtccgattaaagattcttgtgaaagtcgaggttatcaacactgtggtgaatgtgacaactttccttgtgatacattaaaagcttttgcttatgatgaaaaacaaggagacaatggattaagaattcaacaatgtgagatatggaggaatgaataaatgaaatattcaggaagtatgtttgtggttgataatcgtgaaagaacaattcaattttataaagagattttaggcttaagagtaacagttgattttggggcaaattttacgatgacaggtggtataagttttcagaccaaagagagttggatagagtttattaattgtgatagtcaagatattcattatcgtggtcgtgatgcagaaatttattttgaaacagaagatttagatggatttttaactttacttcattctagagatgatattgaatatgttcatccattaaagactcatgattggggacaaaggggaatccgtttctatgatcctgactatcatattattgaagtcagtgaaacgttaacacaagtttgtcgccgtttccaagctcaaggaaagagtgttgaagaaatttctgcaataaccatgttatcacctaaagtgatagagaaaatgttaaaataaaatggcttcaacaaaagaatatgttgattatatcttacaacaattatcacttttagaagatataaaatgtcgtcctatgatgggagaatacttaatttattatcgtttaaaagtgattggaggaatttatgataatcgtttcttaataaaagatgttccttcagcaaaagatatcttacccaaagttatttatgaaattccttatcctaaagccaaaaagatgatattggtcaatattgtagaagatccatatttgcttaaaaagcttatcgaatctatttacgatgaattaccaatgcctaaaaagaaaaactgactcgtgtgcgaaagcacactttttactttcttcattttattatgagagtataatagaaataaggaagtgatgattatggataaagatttacaaaatatatttttaagattatcaaagtcacaatttagaagtcgttttcatctccaaccaaaagattttgattatattgataaaaaggggatagaaaccattcaacaacatgcctatgattttatcaataaacgattagcgccagctaaaataattaatgatgggaaacaaactccgatgcgtggacatccagtttttatagcacaacatgctacggcaacatgttgtcgaggatgtttatataaatggtatcatattcaaaaaggaaaagatttaacgagtgaacaagttgattatatagttgcggttattatggaatggataaaaagagaattgcaaagaaaggaaagtggaaagtatgtataaagtgatttatcatattgatgaaagagaaaaatggtcattaacattagggaatgttactaatatgattgtttattatcaagcacatcatatagattatcaaattgaagttttagcgaatagtgtagctgtctgtgactatcttaaagggagtacatttcaatcacagattctatccttaatagaaaagaaagttatctttgtagcttgtcataatgctatggaggctcatcatattttagcagaacaattgatggaaaatattcaagttgttgatgctggagttgttgaattggtgacaaaacaaagtgaaggatttgcttatattaagccatagaaaggataataagagtatgagatgttgtttaaaatcactttatttatgtgtggaagatatggaaagagctatttgtttttatgaggatttatttgaacaatctgtgactttgaaagatgatatttattcagtgtttgatattcatggttttcgtttaggtttgtttgcttatcgtaagatgaatgaaaagcatctttatggaaataattgtttaccaagtattgagtttgacaatttagaacttctaaaaaagattatagataaccatcaagttgtttttcctttaacaaagattcatgataattgggtatgtgaaataaaagatagtgaaggaaactgtatagaaataacagcaccagtaggttaagattatgaatgattagatggtaaaataaggtttataattggaggataagatgaaaaggatagaagaattaagtggatgtcttgaacaagatgtttcgattgtgttggatagatatcataaagaaaaaacaaaagaacatgtttttcaagtggctaaaaagagtgtggatctagcaagacagtttcatgtagatgaaagaatttgttttgaagcagctttattacatgatataagtgcaattatttcacctttagaaatgcttgagatagctaatgagtatggtttgttattggatcctgctgaaaagaaatatccttttttgcttcatcaacggatttcagtcatatttgctaaagaattttttaatattgataatgaagatgtattgagtgcaattggttgtcatacgactttaaaagctcatccgagtgtttatgatatgattgtttttttagctgataagatagcttgggatcaacaaggagaaccaccttatttagctatgttggaaaaggatttagaaatatctttacaaaaggcttgttttgatttcattgatatgcaatggaaagaaggacgtttattgtatcctcatcagtggataaaagaagcttatgctgatttgcaagaatatatgaatcattgtggtgaataggtattttcataagcgaaagtgcctttttatttttttcgtttcttgaaagtgatacaataagaaaaaaggaggaataaaaaaatgcgtggaatttattcatcagtgacagatattagaagaaagatttttactgaaattgctagaatggcttatgatggagattattcagttattgaagaattaccatttaagattattcccggtgaagttgcaacttatcgtgaaagtattttcttggaacgtgcaatcgtaggggaaaggttaagactagcaatggggcttcctttgcgtaagatagatcagcatactttattatcaaatgggattagtgaaagtgcaattgctgaaaagtattatgaacctccacttattaatattattaaatttgcttgtcatgcttgtccagataatattgtgaaagtgaccgatgcttgtcaaggatgtttagctcatccttgtcgtgaagtttgtccaaagggagcaattgaaattgtaaatggtcgtagtgttattgatcaggaaaaatgtattaaatgtggattatgcataaaaagttgtccatataatgctattatgaaattagaaagaccttgtgcaaaggcttgcggtatggatgctattagaacagatgaaaacggacatgctgatattgattatgataaatgtgtatcttgtggtatgtgtttagtcaattgtccttttggagcaattagtgataaaggacagattttccagcttattacagccatgaaacgtggttataaagtttatgcagctgttgcgccagcttttgttggtcaattaggaccaaaagtaactccagaaaaattaaaaggagcaatgaaagcattaggttttgaagatactattgaagtagcagttggggcagatttatgtacgattgaagaagctgaagatttcttagataaggttccagaaaagcaaccatttatgggaacatcttgttgtccagcttggtcagtcatggctaaaaaattattcccagaatttaaaccttatatttcaatggcattaactccaatggttttaactgctcgtatgataaaaaaagaacatccagattgtaaagttgtttttgttggtccatgtgcagcgaaaaaactagaggcttctcgtaaatcagtgagaagtgatgtggattttgtattaacttttgaagaaatcatgggtatgtttgaagctaaggatattcattttgaagatttaactgaaattgatgaattaagtgaagcaactgctgatggtcgtggttttgctgtgagtggtggtgttgcgcaagctgttgtcaattgtattcatgaaaagtatcctgataaagaagtcaaagttcatgctgaggaaagtttacgtaactgtcgtaagatgttacaagatgctaaaaaaggtgtttatgatggatacttattagaaggtatggcttgtccaggtggatgtattgctggagcgggaactttacagtcaattgttaaagctaaaaatgcagtcaatcgatttaagaacagttctcaaaagaaagtctcatcagaaagtcaatatgctcataaattagatgatttggttgaagattaaattatgaaaaaattgattgttgaaacaactaaacaagaaagaaaagattatgttcaaaagttatttcattgtcataatggagattgtgacaattgtggggtttgtcaaatctttaaaggtgtttcaccacaagttgtatttcaggattatattgaaggaaaaatagaatttcaagatattgcaaaagagtttcatcgataatctgattcaaatatgatattgtctcaatgtatcaaagttgaatatgtcctgcatgcaggacatattcaaaacttcatgttatgatataacctcatttttatctggaggttatgcaatgagaaaggttgaattaagaatgaatgaagaaaataaatatttgattattaaaaaattagttgaaactgatggtaacaagaaacgtgcagctattaaattgaattgtactgtaagaactgtcaatagacttattttgaaatataagaatgaaggtaaggctggttttgttcacggcaatagaagtaaaattccttctactgcaattcctcttgatgttaagaataagatcatcaagctttatattgaggaatatagcgatgctaattttactcatttctgtgaaatcattgaagaagatctgaatataaaaattagtgatacaacacttaataaatggcttagagaagaaaatatcatttctccaaaagccagaaaaaagaccagaaaaatattaaaggaaactttgaaaacaaaactcgaaaatacaagttcaaagaaaatccaaaatgttataaaggaagcaattgctattgttgatgaaaaggatgctcacccaagaagaccaagatgcaagtatatgggggaaatgatccagatggatgcatcaagttatgaatggctcaaaaataaagtatggcatcttcatttagcagttgatgatgcaactggtgaagttgttggtgcttatttcgataatcaggaaactttaaaaggctactacaacgttttttatcagattcttaccaattatggcattcctgctatgttttataccgacagacgtactgtatttgaatataaaagaaaaaacaacgctttcgatgacgaggatactttcacacagttttcctatgcgtgtcacaatcttggcgttgatataaaaacaacgagcgtcgcccaagccaaaggaagaatcgaaagaatgaaccaaacatttcagtcacgattgcctgttgacctcagacgcgctcacataacagatatagagtcggcaaatgaatttttaaaatcctacctaaaaaaattcaatgaccaatttgctctacacctcaatactaccaaatcggtatttgaaacgcaaccatcacttgaaaaaatcaattgtactttagctgttctttctccaagaaagatagattcaggacatagtatcaaattcaagaataagatatatattcctgtaaccgaaaaaggaatacctacatatctaaaaaacaagatggattgtatggtcattgaagcgtttgatggaaatctatatgtcaatgtacttgatcagattcatatcatgaaagaagtgcccgaacacgaactatattctatagaatttgataaaaaagtcattgaaaagaagccaaagaagaaatatattccaccaatgagccatccatggaaacaagcttcttatctaaattatctcgcaaaacaaaagcaccgaaattttggtgctaatgtttaacgatttttgagacattttcaaatttgcttgacagatattgcaaaagagtttcatcgataaactcttttctttttacgaaattcatttttgtacaaggataaaaagatgtataatagtgtacactaagggggagtttttgtgggtgtagaggaaaataattttgccagagggacaatgtcatcacatattattcatcttgctggaccgatgattgtcgctcagctgattaatgttttatataatgtcattgatcgtatttatattggaagaatacctgaagttgccactttagcaatgggtggtttaggtttatgtttacctttaatatcaattattattgcttttgcaaatctgtttggtatgggtggttcaccattatgttccattgcaaggggaaaaggagatattgatgaagcagaagaaattatgggtaattcttttactttattgattcttttttctattttgattatggttattggttttctttttaaagaagatttattatggttatttggagcaagtgaaaatacgattggttatgctaatgattatatgagtatttatttgtttggaactttatttgttttgattggattagggatgaatagttttattaatagccaagggtttgcaaaaattgggatgatgacggttatgcttggagcagttacaaatattattttggatcctatttttatttttggtttatctttaggggttaaaggagcagctattgcgactgttttttcgcagtttgtttcggctgtttggacatttcattttctaactggggataagacaattttaaagattaaaagagaaaagatgaaattaaaagcttgtcatgtgaaaaggattttttctttaggaatggctggttttatgatgggaatcactaattcaattgtcacaattgtatgtaattcaactttacaaagttatgggggagatttgtatgttgcgattatgacaattattaattctatacgtgaagtgatttccttgccgggacaaggtttggctaatgcttcacaacctgttttaggatttaattatggggcaaagcaatatcaaagagttttacaaggtatgaagtttgtaacgattgcttctttagtgacaagtttgttgttatgggggtgtgtgacatcattaccagaattatttattcgtatttttagtcataatcaagatattattagtcatggggttgtttcaattcgtctttatttctttggcttttttatgatgtcttttcaaatgacaggacaagctattgctgtgggattaggtaaatctaaacaggcagttttcttttcaatttttagaaaggtaattattgttgctccattaacaattattttacctcgttttattggaattaatggagtctttattgctgaggcaattagtaattttattggtggaggagcttgttatataacgatgttattgacaattgggaaagagcttatgaaaaagagtaaagaagttgatttaatagaataatgagttgcatattttattgaattatgcaacatgatgtgatatgattttgttatcaaatgaggtgttggtatgcaaacaaagaatcgtatttacatggctattgatttaaaatcattttatgcttcagttgaatgtgtagaaagaaatcttgatccgcttacaacaaatttagttgttgctgatacaagtaaaacagaaaaaacaatatgtttagctgtttcaccatcattaaagcaatatgggattccagggcgggcaaggttatttgaagttgttagtaaagttaaagaaattaatgctaatagaaagcataggattcgaggaaaagcttttcaagatgaatcctatattgatacagagttaaaagaaaatccttatttagagttaacttacatagctgctccaccacggatggcattttatatggaatatagtacacgaatttatgaaatttatttaaaatatgtatcacctcaagatctacatgtttattcaattgatgaagtttttattgatgcaacaaattatttaaaagcagcaaacaaaacaccaaaagagtttgccaaaatgattattcaggatatttatcaaacgacaggtttaagtgcaactgctggaattggtacaaatttatatcttgcgaaagtggcaatggatattgttgctaaacatgtgaagccagatcatgacggggtctgcattgctcaacttgatgaaatgcgatatcggaaatatttatggaaacatcaaccaattactgatttttggcgagtaggtcgtggttatgctaagcgacttaaagaagttggtttatatacaatgggagatattgcaaaatgttcagttggtaaagatgatgagtattataatgaagaattattatataagttatttgggattaatgctgagcttttaattgatcatgcttggggatatgaaccatgtacaatgaaacatattaaagcttataaaccagaaaataatagttttggagcaggacaggttttaagttgtccttatcctttctttaaagggagacttgtcttaaaagaaatgctagattcacttgctttaagtttggtggataagggtttagtaacaaatcaaattattgtaaatgtgggttatgatatagaaaatacgtcatcatatagtggtgaaatcacaactgatagatatggtcgaaagattccaaaacaagctcatggaacgattaatcttgatcgatttacatcatcttctaagctgataagagaagcagttttaaaatggtatgataagtatgttgataagactttgacgattaggagagtgaatatatcggcaaatcatgttgttgaagaaaatattgtgaaagaaaaagaaatgattcaacaaatggatatatttactgattatgagttgttacaaaaagaagaagaaaagcttaaaaaagatttggaaaaagaaaaaaggcttcaacaggcaacattgcaaattaaaaagaagtatggaaagaatgcagtattaaaaggtatgaattttgaagaaggagcaactgctaaagaaagaaatggaacaataggaggccataaagcatgaaatcaaaagatatacataattatgatgacattattgatagacctcatcatgtttcatctcatcatcctcagatgtctttagatgaccgagctgctcaatttgctccttttgctgcattaactggacataaagaagctgtcaatgaaaaagaacgattaactgaaaagaaaagaattttagatgaacatcaaaaagaaatattgaatttaaaactattagagaaatgtatgcatattaaggaacatcctcaaatgaaggtaacttattttcaagcagatgaaaaaaagtctggaggaaagtatgtaactattaatgaggctttaaaaaagatagatgagtatgagaatctattaatttttatgaatggtttaaaaattaatattaatgatatttatgaaatagaataaagaagaaaatgagtttcttgctaaaagtaagttactcattttcttattttaagagccttaattataacaaagaaatataacaatgaaagaaaagggatgtttcaaacaatatgtagaatacacattgatgtatttaattaatgaggatataataatgtatgtttaatgtaataagaatattgattatggaaaaggtgaatgaaatgataaaaaagaatataattataatcctttctttatgtttgtgttttgttttgtttggatgttcatctcagaaatctgaagaaacaaatcctgaaactgaagaaataataaataagattcctgaatttgaatttccagacagttgttttaatcgttttttttcgaaagatgaaaaagacaatgtgtattttaaagctgggaaaaaattgtataagatggataatcatcaaaaactaagtgttgtatctgatttgcttattaataataaatatttaataatgtattcacaatactataataacagtatttatttattgcttttaagtgttaatagtgctgttcatcacaaacctggtattgcaaaaataaatcccgatggaacacattttgaatatttatttgatgtaaataatactctagatattataaatatgtttatatataatgatatcatctattttaatcctaatacggaaaatgaaaatcttattggttattcacttgaagaaccatataatcagatagatagtaaacattattctatatttgatgaaagagctcaacaaatcaaagaagcctttcctgattatcctatttcttttgaacaacatacttataaagaaagtatatacatgcgacataaaaatgaagatgaaagtttttcaatcatacaatatgatgtagaaaacaataaaaaaatagaatatcccttagatcaagatataaaagaaatttggtgtatagatttaattgatgatcgctggtttattagaactgaccaagctatttatcaatataatattgattttacagttggtaaaaaaatattttctggaaatcagctttcaacttatacaatatatgatcaagggaatggtaggtatgatgttcattaaaataaagaatattgtacttataaataatgagctaacatttttaaatggaatatgaattgttatgataaaatattatttatttgtttaataaggaatatgtgatgaaaaaggagatatagatttatgaattattttgaaataaaagacaatacaatagatgaaagtgtaatccatgaaatcagaccgtttattattgaaaagtggcgtaaatatatgactatttttataggaatatttatgcttttttttgcgttgtatggaagtgctactccatatgaaagcacaagagtaataacggcttttggattcccgctttttattttttctattattcaagttattagaatgccaataattgctgaaaaaagaatgttacaaaccttagaagcaatccatactggctcatactgttgtgatataagtttaactgaaaatggtataaaaattaataattcatctgcagaaattaattacaattacatttcaagaatagttatcacagaaagaacaatagcactttttactaaaagtaatgcttgtttaattattaggaaagatggtttagaatttaaaacttataatcaaattgttgattttttacattctatctgtaaaaatgcgaaattgatatataaataaaagatgatagtttagagttatctattaaccaaaatgaaaagaggaaatgatatgttgattaaaaatcaataatttcagatcctcttttttgtttatgatttttgttcaattagttagatacgatgataccaaaattttcaagtgtagaagataatataaaatagtttaaaaaataggataaaaatattttcctataggagatttaatttgtattcaagtaaaaaatagtgatttcaggtgaaaaattaaatatttctatttaattgtgatattttaaatataaacaaaaagttatatagaataaaatcataacattttattaaagagagttctatatttttaattttttagattattatatttgcttgattacttaatatatgtgtagacaaaactattttaaaatcaattaaatgtataagaattaaattaaaatatttttagctttaaattaatcatttttattataagtctaataattaattaagttttatattataatcttgaaaattgaaagagaaaaactatttagggaggaatattgatgattaaatgtgaattacttgctttattttataacaaaagaaagttgtttgttattggaatgtttattgctattatttgttttgatgcttatttagtatatcgaaatagttttttgtatgagtataatttacaccctgtttatgatttgaaaatggtttatgaaaatacatatactccaagtagtgcagcatttttatctggagcatcgaaaggacatataccacagcaaataattatatggttacttcctttatattttttatttatttcgagtgattttcatcttagagaggtgaaatataataattatcagttattacaaatacgtgaaaagacaaataaaatatatatctgtaaattaatatcttcatttctcattggtttttgtgtagcatttataggtgtacttattaattatataatatgtttgattgtttttagaaatgggttggtacaaaagatatcagcagatggactaacttttttatcatcaaataatcctcttttaacatatgtattttatatgattatcttttcatgtatttcgggattggtatcttcttcaatgacagcattatgttttgttgttcctcttaagataccagtatatactgcttcatttggggtttggtattttatgattagtggaaaatatagtataacttatttaatacaaccgtttattgaatatggattatcatatatgattccaagttttcttatgtttatgtgtgtagtgattattattatgattatagggtatttaaaaatcaaaagatcatgaaatatttaaaatggttatttgttattctggggtttatatatttttactacacatttttaggaaacttagaaaatattcaaattattgatatttttgcttcttattcaggaagaaatgcaatatctttacattttagtgtttatatgtgtttgattagtttaataaatagtgaaaagctaaaaatattaaggagtgagtgtgtaattagacaaaatagattgaaaattataaaagattatatgaaaagtattgtatttaattcatttgttttcttaatgattttttatataattggaagtctttttgttatatattatttaggaatagaatactatgttgctacaagtatttatgttccatgtattctttctattattgcttatacagctatttatgttatctttggaataatactactcttttgctatttgtttaccaagaaaattattcttagcattaatttaacaacaatactttcaattatactaaatatgttgatgaaaaatgttttaggtcatttgtcattttttgaaatgttttatgatggggtcatgattatattcccgtttatccaagttttcattatcacattgtttattcttgttattctttacaatattttaattgaagtatttcaaaggaaagatttaatctatgaacagaaaatatgaaatattatcatatattgcatatactataatactatgttatatatctatgataatgaaaaaagttggatttacatgttttgatctaccatattatataaacaatatatattatttattaacattcggtatttttgctttgtttcttatatttcaatttggaagttatgaaatgtatataaaaaatcatgctagttatttggttattagatatagaaattatcgaacaatatataatttgttttttatacgtggattaagggaaacattcattttaacagttataaaaagtattattgatttgaaaatatttcatgtttttgatgtcacatcacttattatttattttatggttattatggcattaatattatggcatattaatttagaaataatggtgagttctaagatggcaatgatattagctttaggttattttgcaatatcgttttctattgccgatttattgatggaatataatatgagtcagtttgtgtattgttttataccaaatatgttggtgatatctagacaacaaaatatatttgtatgtgttattattcttatatgtttactaattgttaattacatagttggcagaattataataaaaaagaaagaaatatattaggaggacaaaatggattatataaagtttgaaaattatacaaaaaaaataaaagataaagttgttcttaacaatattaattgttcgtttgaaaaagggaaaatatatggcttatatggaagaaatggttctggaaaaacaatgttattaagagcgatagcaggattaattgttcctacttcaggatcagtgacagtaaatggtgaaaaaattcatgaaacaattgattttccaaaaaacacaggaataattatcgagaatctttcattatttccagaattgacagcatttcaaaatttaaaaagattagctatgattcaaaataaagtctctgatgaagaaatttataaagctatagagacggttggacttgatccaaaaaacaatgaaaaaataaagacatattcacttggaatgaaacaaaaattaaatattgctcaagcaatatttgaaaatcaagaattgttattattagatgagccaacaaatgctttagatgagcagagtgttaaagatatttacaatttatttatgcaattaaaaagagaaggaaagacattaataattgcatctcacattcgtgaggatttagaatcttattgtgattcgattttgtttattgaaaatggaaatttaagagagaaaagatgaaatttctattaattggagaagaatttcaattggtttttgtttaatgatggttatgttattgacatttgttatagttgcttatgctcaaaatcaggaagttcttattactcatttagaatacaagcgatagtaagtaactgcagaaaataataattataatagctcaatgtataatgtgttagggtactgaaaaacaaaaagtagttatcatataaaaaatactcatctattgcatttttgttggctcaattcataataaatatatataactaatttctgaaaatatatagataaaatacagagctgttttatacaagatatatttagtaatcatatatggaggaataatgagaactatgatgaaaaacaatagattatactgcttacaaaataattattgaaaatataaagcatacactatatgaagtaaattattcatgaactattgctttaattttagataaaaggtcaatttttattttacttattgcaataattgataaatttttgcttattaattataggtgttcagaaaaagttttatatgatacaatttattataaagtattagttaggagaaatgaaatgattaagttttattgtattgatgatgataaggatttcttagaaaagtttaaatatttgattgttaaatatagttttaagaaaaatattgatattacaacattaacatcaactgttataccagaaaatcttccttcaaatattgatgctttttttcttgatgttgaaataggagaacaaaaaatttttccattcgtagaaaaaataagaaatgaaaatttatcaattccaatcattattatgagtaattatgatttttatgtaatggattcagtaaaatataatatttttgattatattagaaagcgtagactaattgatgaaattaatatcacattagataaagtaacaaattatttgcattatttactgccaagaattatatttaattatatgggtgatttaataagtatacagattagagatatatattatgttcaattatttagtcataaaattaaaattattactaataaaaaaacatatgaagttaataaagactttaagcatgtgtttgctgattattgtaaatacttaattcaagttcacaaatcatattatataaatccgtgttatttaaaatctttaaaaaatgattcagttatattagaaaaaaatatactggttcctttaggtatgaaatacaaaaaaaacataagaacgtattttataaagcaatttgcacatttttgatttaagaaatattattttatagaactattactaagaatttttaatataagtttatatattaattgaaaattattgtgacaaaataaaagtacagatatgtgtgaaagtgtggttatcatgttcaatcaaatgataaccattatatttttgacaaatatgttcaatatttttaattccatatccatgtgattttttgtccttttttgttgttataaatgtatttttattttttattattgttccattataactattgatgacagaaatggtgagcttgtatttatctttatatatattgatacttatatatttctcatctgattcttttgcagcactaattgcattatctaaaagattacctataacaatacttaagtctacaggagaaagtatattttctaaatttccttgaatgagacattttacgtctattcctaatgcttgtgctgtttttattttctcacttaataaataattcaatattttatttgaggtattaatttgaattgggggtatatttagaggaatattatttatatagttactgacttcaacattatcattattttctagcattttttctatgacaagcatatgctggcgcatgtcatgatttaccttattcatttcgtcaattctatcatttatgagatcatataatttttcatcatattttcttgtttccaatagtatttgttgctctgtaatttttttgccatctttatttaacctatataaaatgcaacaaactagaatattatttactacaaattctatcaatgacatgaatacaataaaaatactatttatgttattttttaagtattcattgtaaagagtaatagggaatgatacagagataagtattaaaataaaacttaaaaaccatgtttcatttgttacatacagttcattatttttatgttttttaataaaaagatattcaaaaaagagtataaatatttggaaaatagaaatcataaaatattcaaagtttaaagatgatataaaatcttttgaattattagtgaagaaaatgaaaattaagcttatgagtatgctagtaataagaatatttgcaaaaacaagtaagggtgcaaatagtttataatttaaaggaccatctaataaacaaaatgtatagatataaagtagtaataataaaattaatgatgagtaaattggaggataaaaaaggtaattaacaatttgtgaaatcactgtgaaaatgattgcagtaataaatgacatatttttctttttgctaaaaaaaagatctattaataaaataattaaatagttttctatgaaagatattaataaatctaataaattaatagagagggttgttatatttagcataaatttccataactccttttttatgtttctatttattgaaagtgtttcatcatttttaaaatacatagtagacttatgaaaatctacatatatgacatattcgatatttattataacatcataaattggaataataaataggggattagtacactattctatgattaattagaatgatgtacgtactttatatgttttttaatcagtgcaaataacatcatgaattgcattggattctttatgagtatggaatggattatcagttttttgtggttattataaacaatgttcacttctttaggactattttttatataaacaaaacgaagtgtgattagctagatgtaggtaaaaaatgagataataaactatgataaaaaagctatattggttaaacacagtcattagaaatcttaagaataatataaaaggaatatatcatggattaactaaaaaagagatagtttatattctccatatttctaaaacatattttcattaaaaaaacatataattttaagggtgatgacatgaaaaaattagtaccctttattttattatttgcattatgttctttaacgtttaaaccagtaatgagtgccacatcatcacaaactctagcgaagaaagtggtcgttttggacccaggtcacggtggaatggataatggcgcacatgttggaaatgttaatgaagatgaacttaatttgaagatcagttatgccattaaagaggagctagaatctcgaggagcaactgtgtatttaacgcgtagtgatgatcaagatatgacaagacgtgattataattattcaaaacaagatgatatgtatttgcgagctttaaaaatagatgaatataagccggacttatttttaagtatacatttaaattcagcatcatcaagtgcttggggatcacaggttttttattataaaaaaagtagtgatggggaaagactggcaaaatgtattcatgaaaaaatgaagccagtaacgggaacacgtaaaaatatatcttcatgtggtttctatgttttacgtgcaacgcaatcattaggtgtattaatagaatgtggttttttgtctaatgcaaatgaaagaggacaattaaaaaatagtcgttatcataaaaaattagctgttgcgattagtgatggaatagaagaatatgaaaaatcattgagtggaccagttgacattttattgtaatgaagtaggaataatggtatgattaaagtaataaaaaggggtcttttatatgaaaaaaatcataaaattatcatgctgttttgttttattgttatgtttagggtgtacaccaaaatctcatttggatccagataatccagtaactgttcatttatggaattattatactggtaaacagatggaatcttttaatgcacttgttgatacttttaatacaggtgtagggaaagaaaaaggtattgttgtagaagtaacaagtgttggaaatgttaatgatttaggtaaaaatgtgcttgatgcagcaaataaaaaagttggttcatcagaaatgcctgatatttttgctgcttatgcagatacagcttatcaaattgatcaattaggtaaggttgttgatttaagtgattattttagtaaagatgaattagctgaatatgttgatggatatattgatgaaggtcattttaatgacggattaaaaatcttcccagttgctaaatctactgaaattatgatgattaatacgactgattttgaaccgtttgccaaggctaaaggggttactttagatgatttacaaacaattgaaggattaaatgaagttgccaagaagtattatgaatatacaaatggaaaagctttctttggtcgagatgctttagctaattatatgattattggtttaaaagaatttggtcatgatattgtgagtgttaaagatgatcaagtggtttttgattttgataaaacaattgtaagaaagttatgggataattattatttgccttatattcatggttattataaagcagaaggtcgttttagaagtgatgatgtgaagatggggaatattataagttttgtcggttcttcatcaggcgcaactttcttcccaaaaaaggtcattattaatgatgaaaagagttatcctgttgatgttaaagttttaaaagctccaacttttaaagatggacaagcttatgctgttcaacaaggtgctggtttggttgtgactaagggtgatgatgcacatattgaaggatcaatagaatttttaaagtggtttacggatgttaatcaaaatattaagttttctattgattcagggtatttaccagtcaagaaagccgctaatgatatggattcaattgaaaaaaatacaaagatagaatctgaattaatgaaagaagttattcaggtttctgttgatacagttaatgaaagtaaactttatacaacaaaggctattcctaatggaacaagttttagatcaaaattagagtcaagtttaaaagataagagtgaaaaagatcgtcaagcaattgctaaatctctaaagaatggtcaaaatgaaaaagctgtttttgaaaaatatgaaaatgatcaaaattttgaaacttggtatcaagaaacatatcaagcattaaaagagattattacaaatgaatgaattgttaaataaaagaaaatctttatttagacgtgtttttataccaatgtgtatattggttggctttattatttgttttattgtttcaatagcgagttattatgatatatttggtgaaattaatgggaacagtcgtagtttatttgatcaagaagtgaccaaccgagctcattatttagaaaatgcaatggtatcaaaatggtctaatatgggatttgagattgaacgtattaatcaagtgacacatgattatattgaaaaaaatcatgtttcattaaaacagcttgatcattcttcaaaggatagtcaaaagttattaaaagagatttcaagtgaattaattactttactaagaaatagaggaacaactggagtttatttgatgttaagtcagggagatttttcaggtaataaaacacattattatccaggaatatatattgttgataatgatcctgaaagtaaatatgaatcttcaaattcagatttattattaaccagatgtccagttgagcttgttgatgatttagatatttcaatggattcaaattggcagccatcttttgaatttgaaaaagatgatttagagttttatgatgatatttttaagaattttgatttatcagcaaaagatgatgatattgccataagtgatgttggtcgttggataccaccatatcaacgttatggaagtgatacatattctatttcatatattttaccacttatttataataagcatgtttatggagcaatagggattgatgtttcttttgcctatttacaaaagcttttaccttatcatgaattagataaagatgataaagcgggatatatcttagcactgcaacaagatgatacacattatcaaacattatttgtaagtggaccatattattcatcatcaattaaacagttttctactttagatatacctaatgataaagttaaatatattcgggaaaatgtttattgttcaccatatccattaaaactttataactcaaatacaccttattctcatgaaaagtgggttttaatgggaattgttgataaaagtcaactctatggttttactgagcatttaggtactatcttttctattgctatgtttattattttaggaataggaaccttgttatcgtatatattaacccgttatattacgcatccaattgtagatttagctaatcatatttcacaaacatctggtgctatttcaagagtgaatctagaaagaacacatattattgaaatagatcaattgattgaagctattgaaaaaatgggaaatgatgttttagcatcagcttctcgttttacgaatattattgaattagctaatactaaattagctggatttgaattggattatgtaagaaatgaattatttattactgatggattctttgatatcttcttattacatgatattgatacaaagaatttaacagttgaacaatttaaaaaaatatttaagatgtttgattcagtttgtcaaccaacaacaaagcataatgaatgtatttatcatattacatcacagggcgaacaaatctatttacgtttaagatatcatgaaacaagtgaaaaatgtgtaggcttggtcgaagaaattagtgatatgattaaagaaagacaagtcattgaacatgaaagagatcatgatgttttaacgggattagttaatcgtcgagctttccaaagacaaatgaaacgtttatttagtattgaaatggaacatttaaagattgccgctttggttatgatggatttagataacttaaaatctattaatgataagtatggacatgattgtggagattcttatatcaaagctacagcggatatttttgcaagatattcacctaagaataccattgtttctcgtacttctggtgatgagttctatttattctattatggttataattcaaaagatgagattaatcatcatttacaagaattaaagaatgcaatagctgtatcaactgttgttttacctaatggtgaaagagtaagagtccatgtttctgggggagttgcttggtatcctcaagattctacacaatttgaagaacttcaaagatattcagattttgctatgtatacagtaaaacatacagttaaaggggaaattggaacatttgattttgaggaatatgaaaataatgcaattattatgaagaaacgtatggatttccatgagttaattgatcaaaatcgtttaatttattatttccaaccaattgttgatataaaaaccggaaaagtatttggttatgaagctttgatgcgttcaactcatcctgttttaaagaatcctaaagatattttatcgattgctaagttggaagcacaattaaataatattgaaattttaacttggaaaaaggccctagaaagttatcaaacactttctttaaaaggacaggttaaaaaggaacataaagtctttattaattctatatctaatcagtttattcctgatgttgatgtttcaataattgaagaacagtatggttctattttagataaagttgtattagaagtgactgaagatgaagaaaataatgatgattgtttttctaaaaagagtgcagttttaaaacgttggcatgcccaagttgctttagatgattatggtagtggatataatagtgaacgtaatcttttaatggttgatccagcttatgtaaaaattgatatggatattattcgtgatattgataaagaaccagataaacaaaagattgtggaaaatattgtatcttattgtcatgaaagaaataagaaagtcattgctgaaggagtggaaactgttttagagttagcacttgtttatcatttgaaggtagattatgttcaaggtttcttatttgctaaaccagaacaaatgcctccggatattaatgaagaagcattgatggttttaagagaactgaataaataaggggtctctaaatttccgcggggtttgtaaaaacgagactcaaaaataacgtggggttttattgaccccacatgtgtttaaagtgaataaagtatcattcaaaaccatggggttaagaatgatacttttattatgcagaaacaaccgtttctaacgattattctttatttttcttataatttcctctttcttttccaggctctctatttgtcttctttttatttgtcaatagaggtaaggaatctttatttatgcagtacattatacggcttcttaatctttcaaagttcttatattttaatgatgttttcaaaagaacttttattcttccgttaattgattctattggaccatttgatattcttctttgaccaataagaatgaaagaattcaaaatttcagttctccagttttttaaaaatccaacaacatccttaaactcattcatattcaacttgactaattcattatataattcatcatatctcttagctgcatttttatatgtatagtcttggttgaagtcaagatagtcttctttccattcatatgcattttttaataatggatcaatcttgagcatcaattcaagtatttgaggcttgtttatggcatagccgattttcttattgtattgaggaatattatcttcaatgtctccttttcgtttcatgagaaggtgattccaatgtttcagcaaataataattaacgctgtccctatcttgcttggacataacatgaattcgtacattctttaatgcatcgttaatattttttacgacatgaaatgaatcgaccatgacaatacagttcttaaaatgatgataggcaaaatctctgtaggttgtgttcatatcaatgcttacatatttaacattattgaattcacttttattgatgtactgcatataagaatagagcttgaattttttcctgcttggaaatatatcgataatctgacttgtttcccaatcaatgaagatacaagcaaatttattatcccaggttctgcctagataaaattcatcaattgaaagaactctaggaagtgggttaggacgcatggtgacatattgatcaaaaatattgacaacagaagaagtagagatatgatttttttcaccaatagaagtaaaggtataattcaatctcttacagtccttgagaacctgtataattgtagcgttggaaattctttgtctagcagcaatgaaaggattatcttcaagaaaagacttatgacaatcattgcatataaatcttctgcatctgtaattgatataggtgttatttgtgttgaaaatagaatgagtgatttttttaatcttgtaatccttgatatttgcatttaagctgccacagcagggacaaggcttaatttttctggataaagtgacattaataaaaacagtattatcagttcttgcaatgtttaaatcttgaatatcatcaggttgtaaaccaagtaaatttatagtatcataatccatgagttaaaactttcctttcatatatggttgtttctgcaaaaatatcatatcatgaaaggatttttttaatatgaaggagacccctttaaaatttagagataaaaaaagggacaccccacggaattgtagaccgaagggttgaccccacactaatttaaatttcttaaataagttgaagatggatcatacggtccatcttttttaaaaaaaaatacaaaaaagtattgacgaaaaaaatcgactatgataatatattagggcagtcggcgatgggcctgtagctcagttggttagagcgcacccctgataagggtgaggtcgatggttcaaatccattcaggcccaccatttaaaaactgcacaatatatatgggcctgtagctcagttggttagagcgcacccctgataagggtgaggtcgatggttcaaatccattcaggcccaccatatatatagttgaattggggctttagctcagatgggagagcgcctgctttgcacgcaggaggtcagcggttcgatcccgctaagctccaccaattgaaatctaactcgtatcattgatacgagtttttatttttgagttttattgaatttgatagacctttgtgctatgatatctacaagatagttgaaaagtcgtagctcgttactgatgtaacgctttttatttatataaggagaaaaaatggaaaaatatataagtgcattgttgatttcattttatgtgtatggttttgctggatgggtatgggaatcttttatttgtccagtgattacaggtgggaaaataaaaaatagtggttttttaaatggtccaattgtacctatttatggtgtaggagcattgagtgtttctttattgttctctgttcatgaaacttatttatctatttttattggcggtgcttttgttgcttgtgtgattgaatatttcacatcatgggcaatggaaaaactgtatcatagacgttggtgggattatagtgataaagcttttaatgtgaatgggagagtttgtttagaaggctttttggtttttggtttatttagtgtagtagctgtaaagtttattcagccagcactcatggaacgtattttaaatcatggtatgttgatgttggttgttgttgctacatcattaacaacactgcttgtattagatatgattgtgacaattattgctttagcgcatttagaagaacgtctggatggatttatcaaagatgtagaaatgtatgctgaaaaggcatttgatggttttgagtcaggaagaaagaatttctatgatgtattagaaacattaaagatgaatgataagccagcttataagaattttataaaaggaaagaatttgatgtatcatcgtattattaaagcctttccggatttaacaaataagaaaaaataaaagggagtttgtatgaaaaagtttttggggaataaaacattttatttaacaacactatcaattgctttgccaattatggctcagcaatttgtcacaagttttgttaatttaattgataatatcatgattggaagcgttgggagcttagcgttaacatcggttactgtagcaaatcgtatttatttgatttttaattcaacactttttggaatatgtggagcggcaggaatctttattgcgcaatattatggggcaaaggatcatcgaaaatgtcaaaagattttagatatcaatcttgcatgtggtttattggtagcaataggatttgttatagcgttattgataataccaagacagttgattgaaatcttttcatcttctcaggcagttattgatgaaagtatgcgttatattcaatttgctgttttaacatacattccttatgcttttagttttagtattatgatggctttgcgtgctgtaggaattaataagattcaattggttattggaagtattaccgttttaaccaatacaacattaaattttattttaatctttggtcatttaggacttcctgctttaggggtacaaggagcagcaattgcaacatctattgctagatttttagaattaggaatttatcttgttttacttttaagaaaaaaatatttatttactttttcaatttctgggttattgcatttagatgttccattaatacgttcaatgattaaaaaagccatacctttaacagcaaatgaaattttcttttcgttaggactatcaattatattcttatcatatatgcgttgcaatgaaagccttattccagcaattagtgttgttgatacagttatgcaaattgcctatattatttttagtggcttatctagtgctgtttcgattttaattggcaatcgtctgggggctaatcagattagtgaagcacgggataatgcttataaacttattgcttttggagttatgatagctattgttattgcaagtatttttgtatcgattgctccaattattgcatcattttataatgttgaagatattattaaaaagacgattgttacattattaacaattaaatcttgtttattaccagtttattgttataatgcttgtgttttctttactctaagggctggtggagatactttttctacaatgttgatggattcaggattcttatggggtgctggggttttgatttcgacagtattatctatgtttacaaatatttcattggtttatttatttacgattgtagaagctagtgatattatgaaactttttatagcaacctatttctttaaaaaaggaagatgggcaaagaatataacaacggcataataggaggaaaaataatggcaaaagcatcaaaagaaaattatattgttaaaactttaaatggaatggcatatggtttttttgcaagtttaattattggaacaattttaaaacaggttggaattgctttacatattcaagattttgtgacttggggaagtttagcaagttatttaatgggaccagccattggagttggaatagggattgttattgaggcaaagggcttaaatatgatttcagcggttattgctggagctattggcgcaggaacattttctattcatcaaggtaatgtgagtgttgcagtaggaaaccctatttctgcttatttagctgtgattgtggcagttgaagcgacgaaacttgttcaagataagacaccactagatattttattagttccttttacatctattttatgtgcagggattataacacgttttataggaccatacattagtcaattgattatttggattggtgacttaattaatcaaggagtagaaatgcaacccatctttatgggaatggttgttgctgttttaatgggaatggctttaacagcgcctatttcttcggctgcgattgggattatgcttgggctcaacggtttggccgctggagcggcactagcaggatgctgtgctcaaatggttggtttagcaattatgtcgatggatgataatagtattggagatgtaattgcgattggcataggaacaagtatgttacagtttaaaaatattgttaaacgtccacttatatggttaccaccaattgttgccagtttaatcactggggttatttcttcggcaatattaggaatcaagtgtacagccgttggttcaggtatgggaactgctggattggttggtttattagaatgtatccaagtaatgggaacatcattttggttaccattgattcttgttgatgttcttttaccaatgattatttgttttgggatgtatcgtgcttttagaaaactgaattatattaaaagcggagatttgaaattaacaagattataatcatctttggatgattttttcttttattcaagatgaaaagaagctataatggaaatggtgagaaaaatgaaattagaaaaattattagaagaaatagattatcaattcattcaaggagatttatcacaagaagtcagtcaaatagactatgattcacgtctagttgtggataacagtttgtttgtttgtatccctggagcaaatgttgatggacatgattttattgatcaagttattaataaaggagcaaaagttattgttgtagaaagagaagttccttatcaagcaggaattacttatttacaagttgaaaatgctagaaaggctttagcttttttatcatgtgccttctttgatcatcctagtcgtaaaatgacagtgattggtttaactggaactaaaggaaaaacaacaacttcttatatggttgaatctattttacaaaatgctggtaaaaaagtaggaattataggaacaattggttcaattgtgaatggaaaatttcaaaaaacaaaaaatacaacacctgaatcatttgaattacaacgtttaatgaatgaaatggtagaaagtggttgtgaatattgtgttatggaagtttcttcacaaggattgatgttaaatcgtgtagcaggaattgattttgattatggtgtgtttaccaatttatcacctgatcatattggaaaaaatgaacattcttcttttgaacattatatggcatgtaagaagatgttatttcaaatgtgtaaagtcggtatctttaataaagatgatgaacattatcaagatatgattgatcaagctgcatgtcaaatcaaaacatattcaattcatcaagccagtgatttaaaagctactgatattcaattatatcaagggcaaggaactttaggagtatctttccaaacaactggtgaaatgaatgcggcatttcaaactgatatcccaggacgttttagcgtctataattcattagttgcgattatgatttgtcatcttttgaaaatcgaaacaaaatatattcaagaggcattaacaaaagtacgagtaagaggacgtgttgaaattgttcctgttcatcaagattatacagtaattattgactatgctcataatgccttctcatttgagagtattttagaaacaatggaagaataccatccccatcgtatttattgtgtttatggggctgggggaaaacgtgataaaaagcgtcgttatgatgttggtgaagtggttgctagacatcatgcgtattcaattgtgacagcggataatccacgtggtgaaagtacaagacaaatttgtgaagatattgtgacagggattaatcgtgttggtggtgaatatatcattattgaagatcgtaaagaagcgattcattatgctttggctcatgcgaaaaagggtgatattatcttatgtttaggaaaagggcatgaagattatattatttatgatgaagtgaaaacaccatttagtgaaaaagaaattattgaagaatattttcaaaaataggactgaaaaagacttttcaatcatatagtatcttggtgatacatatgaagaaagtcttttttttactagtgataattttgattggtggaatattttatttttcacaacagccacatattcattttattcaagatgagatacatctttctttacatgctaaggttgaaccatatgattatattgaagaagtctcacatatggatatagaagaattaaaaatagataatcaagttaataataataaactaggagaatatcaaattcattatcattataaaaagaaaacattcacactcaaagtctttattgatgatatgttagcaccccaatttgaagtcatcaatgcaaaaatactaagaaatgataaagtcaatcccaaaagcttagtgaaaaatatccaagatgattcgaaaacaattgtttactttaaagaagattatttatttaatgaagtcaaaacatataaagtttgtgttgttgtagaagatgcttatgaaaataaaacggaaaaaaatgcttatgttttagttgaagataaagatcatgaagctccaactatcagtggattaacccccataacaatgttaattggagatgaaatagacttaaaaaaaggaattaaggttaaagatgaccatgacacatcaccaaagcttacaatagatgattctcatttaaatatccgtaaagtaggggaatatgaagtttattatcatgtagaagataaaagtggaaataaagaaacctatgccagagatattgaagttttaagtcaatatgccaatcgagaagcaagaaacgatggacaaaaaacttgttatttaacatttgatgatggtccttcagtcaatacacccaaaatattaaaaattctagataaatatcatatcaaagcgactttctttgtcactggaacttctcctaaagatgcccattatatcaaagaagcctatcaaaaaggacatgccattggacttcatacgtatagccatgattatgaatatatttatggctcactaaaaaattatttgagtgatataaataaaattaaagatgtagtttatgaacaaacgggagtgaatacaaaatttatacgatttccaggtggatcaagtaatttagtttcgaagaaatataatgtgggtattatgaaaagattaacgagaaaagtcattgatttaggttatcaatattatgattggacatcaattaatggtgatggtgaagggattaaaacaataagtggattaaagaaaaaggcaatagaagaaattggagatagagaagatattatgtttttaatgcatgatagtgcaaatcaagaaaatactgtaaaggcattgccttatattatagattatcttataaaaaagggatatcaatttgaagttattgatgataagtctccaacgtttcatcataatgttcaaaactaaaaaatattgatgatagaataatagtcatataacaagaaaaccttgggatagcttatgaaaagtaagaataatattatgttgttttttgtagacaggtattttatgatagagttagacactttttagtagtaggagaaaagaatgaaaaagttattaagttgggtgatgaatcagttatcaaaattaggtagagctatgtttgtaccacttgccgcaacacctattgctggcttattagcgcgtatcagtgcatcagatatgttaaacttaccaatgatagaaaatgcttcatgggttgttttttcaatgatggatttattatttgcaataggctctgtcatggcatatgcaaaagttaaagataaagcgattccaattattggagcgattgtatctttagaagtttttaaatctgtattatcatttattgatccttcaattgatatgggagtctttgctgggattttagtaggcgttatgacagcgattgtttttaactatagtaaagagtggaaaattccagagatatttatcttttttagaggtgagaagctagttgtcactttagctcctttggttgcgattgttttagctaatatttgtagttatgtttggcttcctattcaagctggtttaaatgattttggtgtttggatagcaagtgcaggggcaattggaatatttatctatggtctacttaatcgtttattgattccaactggtttacaccatgttttaaattcatatatttattatgaactcggaacgtttgtaagtacttctggagaagttgtgaaaggtgaattacctcgtttcctcgctggagatccaacggcaggattatttttagcaatgttttttattccgatgatgtttggtttaccaggagtctgtcatgcaatctataaaaaggcaaaagttaataaacaaaagataaaagcatttatgttttcaagcgcaattaccagttttatttctgggattacagagcctattgaattttcgtttatgtttgttgctccacaattgtatattttacatgcattttttactggattttctggagttattctttatttaatgaatgttcatttaggaatgtcggttaatttttgtatcatagattatattatgaattttaatatgggacaaaatgcatggattattatacccgtgggtattttcttctttttcctttatgattgttcatttcaattagcaatcgaacattttgatttaaaaacaccgggcagagaagataatgcagaaaatcagaatatagaaaaagaacttgaagctattttgaatggatctcaatatcaaaatactgcagagaatattttaaaatatgttggaggaaaagctaatgtaattgatgttgaagcatgtacaacaagattgcgtatagaattaaagaatacaaagttagttaatgaagaaaaattaaaacaatgtggttcaaaaggaattatgcgatttggcgaacatgaaattcaaattattattggtgctaatgttaataaaatagcaagggaatttaaagaattattagattgaaatgaaaacgcttaaaaaactattgacatgaaggaaatcttttgctagagtatagatgtaaacaaaaactatatttgatttgtaactattcaattaggcaaagatttcttattttaagatgtctttgcctttatttttttggaggaaatgatatgtttaatattttaaagaaaaagaaaacaattgttgcaccagtcagtggtcaagtgattcctttaagtgatgttaaagatgaagtcttttcatcaggaatgatgggagacggcatagctattcaaccaactgatgatatctttgtagctccttgtgatggtgagattgtattgattcctgaaactaaacatgcttttggaataaaatcaaccgatggaatagaacttttgattcatattggtttagatactgttatgaagaagggacaaggttttcagccacttgtcaaagttggagacaaggttaaaaaaggaacaccagttataaaagttgatgtagagttttttcatcaagaaggaatatccttagttacaccagttatcattttaaatgataacggtaagagtttaaaaaaattatcagttgaaaattgtcagtcaggtacaacgacaatgatagaatattaaaagtatgaaggaggtcaagaatttggaaattctaaaaatttataacaataatgttgtaagttgcctcaataaaaaaggtgaagaaatcattttgacaggggcaggacttggttttaagaaaaaaattggtgattctgttgaaatgaataaggtcactcaaaaatttgtcttagatgatggaaagaaaaagaaaatgaatcaattggttcaaagggttccaaaagaatattttggtttaagtgaagaaatacttcgacaagcagaaactgttttaggaaaaaagataacattatcaacttttatgaattttacagatcatattgctggagccatacaacgtacaaaagaaggaatccttttaccgaatttggttttaatggaagttaaaaccatttggaaagaagaatttgatttgagtttaaagatgattgattatattgaagaaaaaacgggtgtaagattaccagttgatgaagcaggatatatggctttgtattttacaccagaagatcaaaaagaaagagaaaatcgttcccttgaaatgcttcaatatgttacagatattgttaagattatagaagctgtttttgaaataaatattgaccgagattctttagcttatatgcgtttagtcacacatttaagattctttattggacgtgttatgaataaagaattaagagatgagacaattgtgaatgaaaatatttataaattattggttgcaaatgatccaagactattggattgtagtcgatatatcgtagcatttgtaaaaaaagaattggagagtgatgtgaatagagcagagattgtttatttaatgattcatataacacaaatattaggaaattaggattgtaactgaataagcaggcaaaacctaggatatgagatacttatgtattttatattttaggttttttgtttggaaaaaaaggaggaaaaatatgaaaattattaacaatgctgatgattttggttattcaccagccatcaattatgggattattgaaagttatcttcaaggtgttttaacatcaacaacaatcatgccggccatgatgggatttgatcatgcgattgctttagctaaagcaaatccgggacttggaattggagttcacttaacattaacttgtggaaaaccacttttaaaaggacatcagactttagtggatgaaaatggaaactttaaaaaacttgcattttatcaagatgcaacaacatccatcagtgatgaagaagtttatgcagaatggaaagctcaaattgaaaaagtttatcaagcaggtattcaaccaacgcatttagattcacatcaccatattcatacatttaagaataatccatcaattgttaagaagttagctaaagaatataacttacctgtgagaaattcttttgctgataaaacaattttaacaagtgagaatattcaatgtaatgatatactcattgatccatggaaaaatttaggtgataagattgaaaacattgaggataaagtcaaggttttatcagaagaaattatatctttggttcaagaggcatcattacaaaacgagattattgaagtgatgtggcatccagcatatttagattataagattttaacagagtctagttttgcttatccaagagtcattgaagctgaagctattaaacaaaaagacttggtcaagtacatgaaagacaattttgaattatgtacttatcaaaatatatcaaaaggagaggaaaaaaatgtttaacagaattatgaaacaattatcaaaattgggaaaagcaatgctgattccaattgctgcaacaccagttgcagggttacttgcacgtttaagtgcagccgatttattaaatttgccagtattagagaatgcggcatgggttgtttttggaatgatggatttattatttgctgtgggggctgtgattgcttatgccaaagcaaaagataaagctataccaattattggagcagtcatttcattatcagtttttaaatcagtattaactttcatgaatgaaacaattaatatgggggtttttgctgggattgttgttggggttatgacagcaattgtttataactatagtaaagagtggaaaactcctcaaatgttctcattctttacaggtgaaaagtttgttgtaactttggcaccattggttgctgtacctttaggaattgccttcagctatatttgggtaccttgtcaagctggtttaaatagttttgggatttggattgccggtgctggagcattaggagtctttgtctttggtttaacaaaccgtttattaattccaattggtttacatcatgttgtgaatacgtatatttattatgaattaggttcatttgttacagcgagtggtgaagttgttaaaggggagattcctcgtttcttagcaggagatccaactgctggtttgttcttggcgatgttctttattccaatgatgtttggtttaccgggagcttgtgctgcgattgctaaaactgcaaaagaaaagaaaaaagctgaaacaaagtctttaatgacatctggtgctttaacttcatttgtagctggaattactgaaccagtcgaattctcatttatgtttgtggcacctcgcttatatgctttccatgcgattttaactggggctgctggagcaattctatatttattagatgttcatttggggatgtctattaatttctgtattattgattttgtcttgaattttaatatgggaacaaatgcatggattattatacctgtaggtattgtattcttctttatttactactttggatttaagtttatgattgaaaaatttgatttaaagacaccaggtagagaagatgatttcattattgaagaagatatttctgaagaagaattaaatattaaattagagtcatcaaattatcaatatatggctaaaaaactattacaaaatgttggtggaaaagaaaatattgaagaagttgaaagttgtgtaacaagattacgtttagaattaaaagatggagcattggttaatgaagttaatattaaaaaaactggtgctaaaggaattgtgaaattaagtgatacttctattcaaattattattggaacagaagttaataaagttgctaaagaatttaaagaaatgttagaagattagaaggagagtatattattatgggaaataaatttgttattattggagcaggatcaacacatacaccaggaattttagctgctttaacagctaaggcagatgaaatcaaaatgtcagaattatgtttacatgatattgaatatgatcgtgtctatcatatgggtgaatttaatagaatttatatgagtgaacatcgtccagatattaaaacaagttggacgactgatttaaaagaagcattaactggggctgattatgtctttattcaaattcgaccaggaagaaatgaacaaagagcagttgatgaacatacatgttataaacatggattaattggacaagaaacttgtgggctagggggatttgcttttgccttaagaacaattccagcaattttagaaattgtcaaaacagctttagaagtttgtcctaatgcctggttattaaattattcaaatccagaagcaatggtatcagaagcagtttatcgtacttatccacaagctaaaatgttgtgtatttgtgatatgccaatttcacaacaagaacaagttgcagcttatttaggatatgatgaaaaagatttaacttttaaatattttggtttaaatcattttggttggtatacaaatatctataataaaaaaggtgaagatcttttaccacaattaagagaagatgttttatcaggaaaggtgacaggattaagtgcttcacaagatgctggaaaattagatgactattggtttaaaacatttaataatgtcattaaaggatttaaggcttatccagactttatgccattatgttatttacaatattattatttccatgatgaaatgatggaacaatttgatcatgaatttactcgtgcagattcagtattagctggacgtgaaataacagtttatcaagaatgtaaacgtgttatcgaaactcaatcagcaaaagattcatatttgatttctggtgtacatggtaattatattgttgatttagcaagttctattattaatgataagcgtgaaagatttattgtaaatgttatgaataatggagcgattggtaattttaatcatgatgctgttgtggaagttccttgttatgtaggagcatcaggggtagaaccagttgctgttggatatattcctcaattccataaatctttaatggaagctcaaaagggttatgaaaaattagctgttgaagcttgtttagaaggttcatatgataaagcattacaagctattttactaaataaaacagttccttcatatcgtaaaggaaaagaagttttagatgatttcttagaattaaataaggattattggaatccaaagttttataaataaaatattttaacctcccttatataaagttagaagttgttttgatacaacttctttttatcttataatatgttgaaaaaaacttagaaacatgtataatagaatggacttgcaaaaaaggagaaatatatacatgatatcaacacaaaatgtaacattaagatatggtgatcgggctttatttgaaaatgtttctattcaatttacagaaggaaattgttatggaattattggtgcaaatggagctgggaaatcaacatttttaaaaatattatctggtgaaattgaacctaataaaggtgaagttgtgatgacacctggacaaagattgtctgtattaaaacaagatcactttgcgtatgatgaagaagaagtcattaaaacggttttaatgggaaataagcgtttatatgaaattatgcaaagaaaagaagaattatatagcaaatctgattttaatgatgaggatggcttggaattagctgaattagaaggtgaattcatggaaatggatggctggaatgcagaaactgatgctgaaatcttattaaatggattaggggttagtggtgaatttcatcatttattaatgaaagaattaggggatcaacaaaaagtaaaagttttacttgctcaagctttatttggaaatcctgatgttttattattggacgaaccaacaaaccacttagatttaaaaagtatcaattggttagaaaacttcctattaaacttcccaaatacagtgattgttgtttcccatgatagacatttcttaaataaagtttgtactcatattgcagatattgattatagtaaaattcaattatatgttggaaactatgatttctggtatgaatattcacaaatgatgttaaaacaagcaaaagaaattaataaaaaagccgaagcaaagaaaaaagaattagaagaatttattgctcgttttagtgccaatgcttctaaagcaaaacaagcaacatctcgtaaaaaattattagataacttagaaatggtagatattaaaccatcactaagaagatatccttttattgggtttacccctgatcgtgaagtgggaaatattgttttaaatgttgaaggtttatcttatgaacttaatggagaaaagattttaaataatgttagtttttctatttcacctaaagataaagtggcttttgtttctgataatgaattagcagtaacaacattctttaagattattactggtgaaattgaggattatgaaggaacattccaatggggtgtgacaacttctcaatcttatttccctaaagataataatgaatattttgatgactgtgatttaacattagttgattggttaagacaatatgcagttggtgatgtgtatgaccaagatttaagaggctggttaggacgtgttttattctctggtgaagaagcattaaagaaagcgaatgttttatcaggaggagaaaaggtcagatgtatgttagcaaaaatgatgatggctaactgtaatgtcttgattcttgatgaaccaacaaaccatttggatcttgaatcaattcaagctttaaatgaaggtcttatgcgttttaaagaaaatattttatttgcttcgcatgaccatcaatttgttcaaacagtcgcgaatagagttattgaattcacaactgatggatgtattgatcgtctatctacatttgatgaatatttagaatataaagagaagatgggagcttaggctttcatttttttcttaattggaggtttattatgtatcagtatcgagattatataacaataaaagatgttaatgaattaagaaaaagtgtaaaatggaaaacttttgaagctaaacaaatatcaactatgctaaaaaatagtttagctatcataagtgtttatgatcatgataagtgtattgccatggcaaggttaattggtgatggaacttatgattttatagttgatgttattgttcatccaaattatcaaagacaaggaattggacatgacatgattgaacaattattgcatttggcttatgatatgatggaatcacgtgcatctgtttgtttaattgccgcaaagggaaaagaaagtttttatgaaaagtgtggttttcataagattcctgatgatttttcaggaagtgggatgcaaattttcttaactcgatagtctataacttacatatatggataaaataaataagtaataaaaaaaggtttatgccttattcttggacataaacacttttaattttagcaatatacatgatgtgataatctttttgtggataacattgttcatcaattgtatgatcaataaaacattctggtttgattgtatcagcgtagagcttttcaacgataaagacaagttttgcttcttgaaaagtcggaacattatctagatatgtgatatgaaaatcaacatcttcaatcttattttgatcacgtcctgaaactgttcctaataaagaaagttcttttttatatccatcaaaaaaagataatgagaaacaatcttgagaatcaacaaattctttggtatagcgttgtggacggatataagcagtaacaacatctttattccaaagtacacccatgccaccccaagaagctgtcattgtattgacttgattttcatcaccagcagtaatcaacatccattctttaccaatggctacaaatggattcatctttaaatccttaatatcaatttttacaaatgccatttttctaacctcctattatgtttatattatagcataatagaagataaaattatagccgatagggggaggtatactatgaaaaaagctgtcaaagttattgtgtttataagtgttttttgtttgattgttttaagctgtttagctttatacgtaggaaattacctttatgattatacactcaatccctatgccaaacataatatttcagaaaaaatagaaacaaatgaagatgttgaacaagcttcaagactctggctcaatgaaaaaagtgttaatgtttctattgaaagtgatgatcatttacagcttcatggttattttatagaacaagatcatcccatctatgtgataatggtacatggttatcgtggtgatggcgcaagtattattgcaccaattaaaaaattttataaacagggttataatttgttgattcctgatttaagaggacatggtttaagtgaaggtgattatattgggatgggctgggatgatcgtttagatattttaaagtggattgattatattcttttgaagaatcaaaatgctaagattgttttatatggtgtttctatgggaggagcaacggtgatgaatgtggctggagaaaaactccctcgggcagtaaaagcaattattgaggattgtggttatacgagtgtttgggatatttttaaatcacatatagatatgcctgaaattgaaagtgagctggctatgcatatggctagtctggtgacaaaagttcgagctggttattatttggaagatgttcaacctattgaacaagtcaaaaagagtcaaacgccaatgctttttattcatgggcgtgaagatcattttgtgccttttagaatgcttgatgaattgtatcaagctgcaacttgtcctaaacaaaaacttattgttgaaggagcaaaacatgctaatagctgttcagttgatgaagcaacttattattcaacagtgtttaattttattgatttatatacaaaataaaacgtacgcctaagcgtacgttttatgccatctctagctttctttcattgcgtaattcatataaaagatgtcttacttcttctaaagtatccattgcttttaagaattcctctttttcttttaaatcaatatcttggttttctaatgttcttaaaagatttaaagtgctataaaccaaatcgttggctttatcaatattgttatccatgttcattcctcgcttttctatttttattatacaataaaatgacacaaaagtattataaatataataaaaatgtaactataattccaaaatttttgtaaattcaagacaataatgaagctaaatagctgaataatgaggttgaaaataagcatatttaagggaatttgttgagaaataacaaagaatatcaaagtatgtagaataatgtagaaacataaatataaacttacttgttttagcaatatagcataacatttcctttttgataatctgattctcataaaagtatataaacatatatattgataaacaatttgataaaggagataacaccaaaagatttgaatactcataaagatgagataacggaagtctatttgagaataatggaaaataagtttggatagaatgtcttgatagagtggataaagaaagaaaatcaatagactataaagaataatgatttttaaagtcttgatcttggatgatttgtccatttttaagttgatagatagtttgataatgaatgtcagttaaataatcatgagcagcaattataattgttttgccttgttcatgtaaatcattaactaactgacaaaaaatctttactgactcaaaatcaagaccacgggtaggttcatctaataaaataagattttgattctccataatagcttgaataattcccgccttttgacgcatccctaaagaatagtttttcatcttaatcggactatataaatcaagttgaaaaagtgtacataatctggcaacatgggtttcatcaaaatgatgttttaaagaggctaaaaaacgtaaattaaataataaagtttcattttctaagaaaccgggattttcaattaaagctcctatatgtacatcttcatccatgacaatacaacctgtatctgcttcaagaatatgacaaattaatttaaataaagttgatttcccagaaccattaatgccatgaatataaataaagtccccatcttcaatctttaaatctaaatcttttaaaaccgaatgtttatgaaatgatttgtttagttttgatatttctaacatattgacctcctaaaataattgactaaataaaatatgaaataagaaattaatgaaaatcggtaaagctaaataaaggaaattctttttttgaccaatttgtaaataaataatggtattttctatacagacaacaatgatattaagtaacatataaataacagtgatataaagactttgaatttcaatagctccaaagaaaaaatagtaacttatataaatcataaaggtataaagtaaaccaagtagaataagtgaaaaataagtcatttgataatattttttttcaccaatcctaagtaacataaaagcatgtaaactattaaaacgataagccaattgataagtcatcaatagaaagatattgttcatatagacagttaaataatgtgaatagattaaacaaatagtataagtatttttgccacataagattggtgaagccaataacatgccaatcagtaaaaccactaaacgataatctaataaatgataaaactttctaatcattgatttgtctcctctttataaaaatttcaaaacaaataatggaaagcagactataaagcaaagcactgatgaaataaagagaaagattggataaaccaaatggattcacccgaacattttccatgccaatagcgactagattattaatttggagaagaaaagcggcttcaggaatgggtaaataaccttgaataagcgctggaatgagcactaaaaggataccaaagataacaccaaaacagcgatagatatatttattggtaatgatgatttgaagtgagaaaacaagactagaaacaatactgtagcctaaagcagtgaagatgagaaagaaaataaaactaatgagttcattatgtgcaaggacttgtgttgtacagtaataatcaataggataattcattgtattaaaatgaataggtaagtaaaaaaagtgaataatcagtgccataagtccttgaatcaccaacataacaataaaagtcatcaagatattctttttaaaaatatcaaaataatattgttttttattgattcttgtttcaatcatataagcatgatgattttgatgcatgtttaaaaagtcataactgacgagatttggcaacaataacatcaataaaataaaaaagaaaggatttaccccaatacaatagatataatagaaaaattctaaaccagcattgggataattcacatcataattggcataagaaaaaatagaattttgaaaagttgtataaatactgatattaataagaataaaaacaatgaaaataagtaagattttttctttatgaagaaaaggaaaccataatgatttattgctttgcatagctaacctccttgtattttgttggttataaaatacataaaaagtgaaagaaaaatagataaaagcgtaaaaagtgcacatattgaccgaaaagtggcattttttttgtcagattttgtagtaaaatagagatgataagggaggctagtaatatatgaagatattaatttgtgaacaaagtgaagaatttgtagaccatatggttaagacaattcgcagttatccttgtgatgaagaaattattattgaaagctacactgatactgtggggattgctcgtcgaattgagaaagaaaattttgatcttgcttatttaggaggagtcattaatgggagaaatggttttgaactagggagaatgattcatgaaaagaatcctgcgtgtctattgatttatgtgtgtgaggattatcgttatatgcatgaaggatttagggcttatggattccagatggttttaaagccacaagagaaattatttgattatgaatttaaaagagctttgatgatttataagaaattgcattatcatatattatttcatttagataatggtaaaactcatgattttctaccttcagaaattatgtatattgttattaataatgatggtttagaagtagtcacagaggatcgtcgttttaaaggacattttgagaattttaagaaaattcagcaagaattgatgaatcaacatcatttctttccaatgcatcctaattattttgtaaacatggaatatatttcagttgtcagaaatggcgagttaggaatggataatggggattgtgttccaacatcagcaatgaataaagaaattattgatgatgcgattcaatcttatatgcgagaaatttaactaagataaaaaacgaaaaaattgtagaatagtggttgaaaaatcataggagaaatgatattattcacttagttatacaactggcggaagtggaattaaccacatggagtataatggtaagagtcgaccgtctgggcaatagtctggacgagtaggctctttttttggttttttggaaaatgataacgatatcactggtgaaaaaccgatatttgtggtataaaagaagtggaaaagtccttgatttcaataataaaaaaagaaggggtgttatgatgttaacagatgtagaaattgcacaaagtgcaagtatgttaccgattaaagaaattgcacaaaaagtaggattagatgaagatgatttagagctttatggaaaatataaagcaaagatttcattagaagccatcaataaattaaaaaatcaagaagatggtaaattgattttggttactgcaattaatccaacacctgctggtgaaggaaaaacaacaacaatgattggtttatctcaagctttaaataagttagggaaaaaatcagtggtggcaatgcgtgaaccaagcttaggaccttgttttggtgtgaaaggtggggcagctggaggaggatatgctcaagttgtaccaatggaagatattaacttacattttactggagatattcatgcgattacaactgccaataacttaattgcagcaatgcttgataactctattcaacaaggtaatccattagatattgataccagacaaattgtttggaaacgtgttgtggatttaaatgatcgtgctttaagacatatcgttgtaggccttggtggaaaagtcaatggtgtgcctagagaagatggatttgatatcagtgtagctagtgaagttatggcgattttatgtttagcaacttctttagaagatttgaagaaacgtgctggacgtatgattgtggcttataatcatgctggtgaacctgtaactgttgatgatattaaggcaactggagcagtgacattattattaaaggatgcgattaaaccaaatttagtgcaaactttagatcatacaccggtttttgttcatggtggtccatttgccaatattgcccatggatgtaactctgtaatggcaacaacacttgctatgaagttaggtgattatgcgattactgaagctggttttggggctgatttaggggctgaaaagttcttagatattaaatgtcgtcaagctggattgaatcctgatgcagttgtcattgtggcaacagttcgtgcgttaaagatgcatggtggtgttgcgaaaaaagatttaggtgaagaaaatttagatgctttaagagcggggattgaaaaccttgaaaagcatattgaaaatattgcaaaatacaatttaccaagtgtcgtagctattaatgctttcccaacagatacagaagcagaacttcaattacttaataagatttgtcaagaaaaaggtgttgatgtagcgattagtaaagtttgggaaaaaggtgctgatgggggaattgaattggcggaaaaattgttgaatgtattagagacaaaagaagctcattttgcgccaatctatgatcttgatttaccaattcaagaaaagattagaacgattgttaaagaaatctatggtggagatgatgtcactttcactaagaaagtgttaaataagataaagaaatatgaagcacaaggattaggaaacttaccaatttgtgttgctaaaacgcaatattctttatctgatgacccaactttgttaggtcgtcctagtggtttcaaagtcacaattaatgatttgattccaaatactggagctgggttcttagtggctattagtggtgatatcatgcgtatgccaggacttcctaaagttcctgcggcagtcaatatggatattgatgaagatggaaaaattgttggattattctagagatgaaaggatgaaaaaatgaaagttgctattattatgggttctacaagtgatttatctaaggtagaaccagctgttgagattttaaaaagttatggagtagaagtgaatgtgagatgtttatcagctcaccgtgctcatttaggtttaagtcaatttattcaagaaacagaaactgatggaacagaagtcattattacagctgcaggaatggcagcagcattacctggagtcgttgcttcacaaacagttttaccagtcattggggtaccattaagtggtgcaacattagatggtatggatgcattactttcaattgttcaaatgccttcagggattcctgtagcaacagtagcaattaatggaagtaaaaatgcagcttatctagcattacaaatcatggcaattaaacatgatgatattaaagcaaaattattagattatcgaaaagacatggaagcacaagcaatgcgtgctaacgatgaaatgatagaaaaatttaaataaaaaaggggcaaagaaaaatggctaaattattgtacgaaggaaaagcaaaacaagtttatgaaacagaaaatccagatgaatatatgattcattataaagatgatgcaacagctggaaatggtgttaagcatgaccaatttgaaggaaaaggtgttttaaataacacaatttcttgtattatctttgatatgttagaagaagctgggattaagactcacatgattaaaaaattaaatgatcgtgatatcttagtaaaaaaagtagaaatcttcccattagaagttattattagaaatattacaacaggatctttctgtaaaagattaggagcacctgaaggggttgttttagatgaaccaatctttgaaatgagttataaaaatgatgattatggtgatccattaatcaatgatgatcatgctgttgcattaaaattagcaacacgtgaagaattagcttatattaaagaaacaactttaaaaattaatgaattattaaaagaattcttcttaaaatttaatttaaaattagttgattttaaaattgaatttggtaaaacagcagatggagaaatcttattagctgatgaaatttcacctgattcttgtcgtttatgggatgttgaaacaaaccaaaaatatgataaagatgttttcagacaagatattggggatttaattgaaacttataaagctgttttagcacgtatgcaaagtaaataagaaggagataaacaatggattacaaaaaagctggagtcgatattgaagctggatacaaatcagttgaattgatgaaaaaacatgtcaaagaaacaatgcgtcctgaagtcttaggtggacttggaggatttgctggagcttttgatttaagtgcaattaaaaatatggatgaacctgttcttttatctggaactgatggttgtggtacaaaagtgaaacttgcttttgttatggataaacatgatacaattggaattgatgctgtagctatgtgtgtcaatgatattgcatgttctggtggagaaccattattcttcttagattatattgcttgtggaaaaaattatccggaaaaaattgcaactatcgtaagtggtgttgctgaaggatgcaaacaatctgaatgtgctttagttggtggagaaacagctgaacatccagggttaatgcctgttgatgattatgatttagcaggatttgctgtaggggttgttgataagaaagatattattgatggttcaacgattaaacctggtgatactttaattggtattgcttctagtggggttcatagtaatggattctcacttgtaagaaaagtttttgaaattacaaaggaatctttagatacatactatgatgaattaggaaaaacattaggtgaagctttaattgaaccaacaagaatttatgttaaagcattaaagaatgtgaaaaatgctggtgtgaaaattaaaggatgtagccatatcactggtggtggattctatgaaaatgtacctagaatgttaccagaaggaataaaagctgttattcaaaaagaaagttataaggttccggcaatttttgatttaattgcgaaaaatggagatattgctgaagaaatgatgtataacacattcaatatgggacttggtatggtgattgctgtagatgaagctgatgtagaaaaaacaatggcagctattgaagcagctggagatacatgctataaagttggacatgttgaagcaggagataaaggagtcgagttatgctaaaaatcgcagtctttgtttctggtggaggaacaaacctgcaatcactgattgatgctacccaagctggtagcatcaacggtgagattgttttggttgtttctaatagaaaaaaagcttatggattagaaagagctaaaaatgcaggcatcaaagctgagtgcattaaagatgacaaattactgattcaacgtttaaaagaagaaggcgttgaattaattgttttagcaggatatcttgctattttaagtgatgaattggtatcactttatgaaaatagaattatcaatattcatccatcattaattccagctttctgtggaccagggttttatggattacatgttcatgaacatgcttttaaacgtggtgtgaaagtagctggagcaactgttcattttgtttccccagttgttgatggtggaccaattatcttacaagaagcgatggatgtatcaaaagcatcaacgcctgaagaaatgcaacaaatggttttaacaattgaacatcgtattttaccagaagcagtgagattattctgtaatgggcaattaaaagttgaaaatgaaagggtcgaaatattatgaaaagagcattagtcagtgttacaaacaaagatggtgttgttgaattttgccaaggattagtaaaattaggttttgaaattgtttcaacaggaggaactttacataaattacaagaagctggtatcaaagctattgcgattgatgatgtgactggattccctgaaatcttagatggacgtgtcaaaacattgcatcctaaagttcatggtgggttgttatttagaagggatttacctgaacatgttgcaactgttaaagaacatgggattcaaccaattgatttggtttgtgtgaatttatatgaatttgaaaaagctttaaaagctggaaaaccaatggaagatatgattgaaaatattgatattggtggaccatcaatgattagaagtgcagctaagaactttaaagatgtcttaattgtgactgatcctaaagattatccaagtgtcttagaagccattgaaaataaaacagataattatgattttagattgaatttagcatataaagcatttagtacaactggtgcttatgatgctatgatttctcgctattttgctggtgttgttggtgatgaattcccagatacattaaatatttcattaaagaaagtagaacatttacgttatggtgaaaactctcaacaagctgctaataaatatgaagatccatttgttcaaaaatcattattagattatgaacaattacatggaaaagaaatttcatttaacaatgttaatgatttatatggtgctgttgcagttgtaagagaatttggtgatcaaattgtaacggcagcgattaaacattctacaccttgtggagttgcaattggaaaaacaggatatgaatcatatatgaaggcttatgaagctgatccacaatctatctttggtggtattgttgcagtgaactataaaattgataaagcaacagctgaagaaatgcacaaaattttcttagaaattgttgctgcacctgattttgatgatgatgcattagaagttttaaagaaaaagaaaaacttacgtatcttaaaattaaagaatttagatgcaagagaagcaaaatatgatattaaatatcttgaaggaaaagtcttagttcaagagttaaatacaaagatgattgatgaaatgaaagttgtcacaactgcttctcctacacaagaacaaatctcagatatggaatttggtatgaaagttgtaaaatatgtcaaatcaaatgccatctgtattgtgaaaaatggtgtcactttagccattggtggaggacaaacttcacgtgtatgggctttagaaaatgcaattgctaataatcctgataaagatttcaaaggtgctgttttagcaagtgatgcattcttcccattcaatgactgtgcccaggtagcaattgatgctggtattacagcaattgttcaaccaggtggaagtattagagatcaagattctattgatttatgtaatgaacacaatgtgccaatggtctttacaggttatagacattttagacattaaggaggaaaccatgaaggtattaattattggtagtggcggtcgtgaacatgcgattgcatatgccttgaataaaagtcctaaggttgatgaaattcatgccattccaggaaatccaggaattgcacaaattggaacttgtcatccaggcagtgtcgaagatttagaaggtattttaaaatttgttgaagataacagtattgattttactgtcattggaccagaagttccattatgcatgggactagcagatttattagaaagtcatggacataaagtttttggaccaacgaaacatgcagcgactttagaaggcagcaaagctttctctaaagacttcatggcaagacacaatattcctacagcagcttatgaagaagtgaattcttatgatgaagcgattgctgctttagaaaaattctcttatccagttgttgtcaaagctgatggtttagctgctggtaaaggtgttgtgatttgtgaaaattatcaacaagctcaaacagcattaaaagaaatgatgattgatggtgccttagatggggctggaagtaaagttgtgttagaagaattcttaactggatttgaatgttcattactttgctttacagatggaaaaacaattgtaccaatggtaagtgccaaagaccataagcaagtatatgatgaaaataaaggtcctaataccggtggtatgggaactgtttcaccaaatcctttcttaccagaaggtatggatgacatctttaaaaaagatatcttagatccatttatggctggtttaaaggctgatcatatggattatcgtggtgttgttttcattggtttaatgattgaaaataacaaagccaaagtcttagaatttaatgtgcgttttggtgatcctgaaacccaatctatcttacttcgtttagatagtgatttatttgatattatgtatgctgtttctactggtacattagatcaagtcaatgtaaaatggaaagaggaacatgtcgcttgtcttgttttagcaagtggtggatatccaggtagctatgaaaaaggaaaagtgattactggattagataaagtcaatgatgatatcattgttttccatgctggaacagcttttaatactcaaggcgaagttgtaacaagtggtggacgtgttttaaatatttgtgcttttggtaagaatcttgaagaaacaagagaaaaagtttatcaagcagcagaagtgattgattttgaaggtaaatattatcgtaaagacattggtcttaattaatgaggtgaaaagatgagtaaagtctatcgtatatatgtagaaaaaagaaaagattatgcagtagaagctaatgatttgcttaatgacttaaaaacacaattaaagattgatagtattacgtctttgagtattgtgaatcgttatgatgttcaaggtgtaagtgaagatgttttaaatcaaggggttccaactatcttaagtgaaccaatggtggatgatgtttattttgaagattatccagcaagtgtaggggcaaaagtttttgcgattgagttcttacctggacaatatgatcaaagagctgatgcttgtgaacaatgtttccaattattaactggtgaaaagaatgtcaaagttaaatgtgcaaaattaattgttttaatgggtgaattaagtgatgaagatgttgcccgtattcaaaaatatttaatcaatccagttgatcaaagattagcatctttagataaagttgatgatttaaatgatggtcaagtgcatattgatccagttccagtgattgaaggatttattgattttagtgatgatgcattaaaacaatatattcaagataatggaatggcaatgaattttgatgatttaaaagtgactcaagattactataaaaatgaagaaaaaagagatcctacagaaacagaattaaaagttttagatacatattggtctgatcattgtcgtcatacaacatttgcaacaattatcacagatttagatattgaatcaggagcttttcaagaaatcttagaaaaagatgtagaagattataaaacatcaagacatcttgtttatggaattgatacaaaacgtccattaactttaatggacttagcaacaatttctatgaaagaacttagaaaaacaggttacttagatgacttagaagtctctgaagaaatcaatgcttgttcagttgaattaaagattcatacaagtgaaggtgatgaagattggttattaatgtttaaaaacgaaacacataaccatccaactgaaattgaaccatttggtggagctgccacttgtttgggtggagctatccgtgatccattatcaggacgtgcttatgtttatcaatcaatgcgtattacaggtgctggtgatcctagaaaatcacttgatgaaacaatggcaggaaaacttccacaaagaaaaatttgtcaagaggctgctcatggattctcaagttatggaaaccaaattggtttaacaactggttttgttcatgaaatttatgatgatggatttgttgcaaaacgtatggaacttggtgctgttgtagcagctgcgccaaaagatcaagtgaaacgtttagaaccattaaaagatcatattgtcttattaattggtggtagaactggtcgtgatggaataggtggagcaacaggttcttctaagaaacatgaattaaaaacgacaacaacagctggtgctgaagttcaaaaaggaaatccagttgaagaaagaaaaattcaaagattatttagaaataaagctgtttctgaaaaaatcattcgttgtaatgactttggagcaggtggtgtctgcgttgctgttggtgaacttgccccaggtttagatattaatttagatgctgtgttaaagaaatatgaaggtttaacaggaacagaacttgctatttctgaatcacaagaacgtatggctattgttattgatgcaaaagatgaagaaatgattaaacaagcatgttatgatgaaaacttggaagttgtcaaagttgcgacagtcactgataataaccgtttaacaatgcgttatatgggtcaaactattgttgatattgatagagctttcttagataagaatggggcttctcgttatcaaaagattgaagtgaaattacctgattttgataacacaccatttgaaaaagaagcaaaaccaacttttaaagaaacttcaaaagaagttttaagtcgtttatctgtttgtggtcaaaaaggtttagttgaaagatttgactcatcaattgggaatggaacagttttatcaccatttggtggaaaaactttaagaactgaaacagaaggtatggctgctttaattcccgtattaggaaaagaaacaacaacatgttcattaatgagttatggatataatcctgaaattgctaaatggtctccatatcatggagctatgtatgccattgtagaatctattgcaaagattgttgcaatgggtggagattattatacaattcgtttctcattccaagaatattttgaaaaattattagatgttccaacaaaatggggaaaaccatttgctgcattattaggagcatatcgtgttcaatctgaaatgaaattaccttctattggtggtaaagattcaatgtcaggaacatttgaagatttagatgttccaccaactcttgtttcatttgccattactggagcagatgtgaaagatgttatgacacctgaattaaaagcagaaagtcatacattggttgaagtgatgttaccaaaagatcaattccatgtttatgattttgatgctttaaaagcacaatatgatgcagttatggcattaatgagagatggaaaagtttatagtgcttatacaatcaaagatggtggcgttcttgaagctgtttataagatggcttttggtaatgcgattggtgttgaattgaatagtgaattaacacttgcatcaatgattgataaaaactatggaaatatcatcttagaagttgaaaatgatgatgttgtgacttttgaaaatacaagaatcattggtcatacaaacaatgaaaatagtgtttcatatcaaggtgaaactttatcattagatgaagcatacagtgtttatgcatctgttttagatgacgtttatccaacaacagaaaaagctccaacaactgatatgattgttaaagattgccaagaaagaggattattacatgcttctcgtgtttacgatgaagtcaaagttgttattcctgtattcccaggaacaaactgtgaatatgattctaaacgtgcttttgaaaaagctggcgcaactgttcaacttgttttaattagaaataaaacagaagctgatattaaaaagtcagttgatgaattagaagcagctattagaagtgctcaaattgtgatgttaccaggaggtttctctgctggtgatgaaccagaaggttcaggtaaatttattgcgactgttttaagaaatccaaaattaaaagatgcaatcagtgatttattagataaccgtgaaggtttaatgattggtatctgtaatggattccaagctttagtgaaattaggattacttccttatggacatattaagacaatggataaagatgatccaacattaacattcaatacgattggacgtcacttatcacaaatggttgatacaagaattgcttcagttaaatcaccttggttaacaggtgtcaatgtaggtgatatccatacagtccctattagtcatggtgaaggacgtttcgttgctcctaaagaagttattgaaaaattatttgaaaatggtcaagtctttacacaatatgttgatgataaaggacaaccaacgatggaatcaccatataatcctaatggatcaatgatggcaattgaagggatcttatctgctgatggtcgtgtcttaggtaagatggctcatagtgaacgtcaaggtgaaaatagaaataaaaatatttatggtgaaatggatcaaaaattatttgaagctggtgtaaaatattttaaaggtggtaaataaatggaaaatcaagaatttgaaagtatgacactttgtccattagatggacgttattcaggtatcaaagatgctttaggtgaatatttttcggaatatgctttagtgaaatatagagtttttgttgaaattcagtggttaaagttcttaattgaaaatgttgaaagtgatattttagcaaaattcaataaagctgaaatggataaaattgaatctatttctaaagatttcaattatgattcatttgcaaaaattaaagaaattgaagcaacaacacgtcatgatgtaaaagctgttgaatatttcattggcaatacattaaaagaaatgggttatgattatttaattagctttgttcatattggatgtacttctgaagatattaacaatacatcttatgcatgtatgttaaaatatggtttaaaagatgtatggttacctaaagcaaaagaatttgctgatattattaatcaatgggctgagaatcataaagatgatgcaatgttagctcatactcatggacaaccagcaacaccaacaacaattggtaaagaatttaaagtttatgcttatcgtttcatgtctagtattgaaaatattgaaaatattcaaatcaaagcaaaattcaatggtgcaacaggaaactatagtgcaattttaacggctttccctaatattgattggcctacatatgcaaagaaatttgttgaagattatttaggattagctttcaatccattgacaacacaaattgaaagccatgactatacttgtcatatcctagatggtattcgtcatttcaacaatgtcttggttgattttgatgttgatatgtggttatacatttcaatggaatacttcaaacaaattcctgtcaaaggtgaagttggaagtagtacaatgcctcataaagtcaatccaattcgttttgaaaatagtgaagctaatattgatatgtctaacaatatctgtgttgcattatcaaataaacttcctaaatctcgtatgcaaagagatttatcagattcatcttcacaaagaaatttaggacttgcagttggatattcattacaagcaattaatgaaacaatgaatggtttagcaaaatgtgttgttaatgttgataaattagcttctgatttaaatgaaaaatgggaagtcttagctgaaccaattcaaacaatgttaagaaaatatggtgtccctgatgcttatgatacattaaaagctctcacaagaggaaagagtatttctaaagaagatatcttaaaatttgcggaaagtttagatatcttatctgatgaagatcgtgcaactcttgttaatatgactccagcttcttatattggaaaagcaagtgaacttgctgatattaagttgaaataatacatgaacatctaccaatttggtagatgttttctatttctataaacagaaaagaattaactttattgataaaaatgagattagtgttaaatgtatttaaaacaatttctattcattgaataaagcaattatgttatgatagataaaataaaggagattgcttatgtatcaaaatatttttaaatttaaaggaacatggcgaaactatcaacaacgtgttttaaatcgttttgaagattataaaagtgatggaaagattcatattgtagcagcccctggttcaggtaaaacaacactgggaattgaattgattaggcgacttgatcagccagcacttattttggttcctacaattaccattcgacaacaatggatagaaagaatcaaagaagcttttttaaacgagggtgttgatgcgagtttatacttatctgaagatttaaaggatttaaagttaattacggtttcaacatatcaagctattcatagtgcaatgagtcagtatcagggaattattgaagaagatgaaaatgaatttgataaacatcaagaagaagttgattatcgtgattatcattttcttgatgaaatcaagaaagccaatattggtattttatgtttagatgaatgccatcatttacgaagtgaatggtggaaagctttagaaactttaaaaaaacaaaatcattttccttataccattgccttaacagcaacaccgccatatgattcaagtataggtatgtggaatcgttatattgatatgtgtggtgaaatagacgaagaaattacagttcctgaattagtcaaagaaggaagtttatgtccacatcaagattatgtgtatttcaattatcccacaagtgaagaaacaaaagaaatacgtgcctttgaagataaaagtcataaacttctagaagaattgatgaatgatataacttttcaaaaaacaatacaaacccatacatgtttatttcaacaaccagatttagatacattattagataaacctcaatacctttcagcagttcttattttcttagaagaaaaaggtttaagttatcctaaacaatatcaagagattttaggttatcaaaaattagagaagatgtctttaaaatggatggaaatcttattacaaggtttattgtttgacgatcatgattcatatgcaataagtgaagaatatcaagaacaattattaaaaagattaaaatcacaaggctttatagaaaaaaatcaagtcttattagagatgaatcaagccattgaaaagatgttagtgaaatcagttggaaagtgtgaaagtatcaaagatattgtttttcatgaatatggatgtttaaaacagaatttacgtttattaatcttaactgactatattcgtaaagaatatgaaaaagctattggaaatgaaacaatggatgttcataatttaggtgttttacctttctttgaattattaaggagagaagctttaactttacatcaagatataaaattaggtgttttatgtggaacaatggttatcataccaaaacatgcaaaagaaagattgacacaaatgattgatcatcctagtcagttatcatttgatagtgttggatgtattgatgaatatgttaaagtgaatattcatggtgatcaacattttattgtggatgctgtgagtcaactctttgaagaaggatatatgcaagtcttaatcggaacaaaatcattacttggagaaggttgggattcaccatgtgtcaatacgttaatcttagcaagttttgttggttcgtttatgttaagcaatcaaatgcgaggaagggctattcgaacttttatcaaagatccacaaaagaccagtcatatttggcatttggtttgtgtagatccacaaatggcaaaaagcatacaaggcttagaagcaagtcaagattttcagactctatcacgacgtatggaacattttttaggtctgcattatcaaaatgatgtgattgaaaatggcatagaacgcttaacggcaattcattatcccttatcaaaacacaatattaaaatcacgaacaaagaaatgtttaaactttctcaagatcgcactttattgaaacaaagatgggatcgttctttagctgtttatgatcaaattgaagttgttgatgaaaatcaagttcaagagaaaatgattacagcagtcatcttaaatgatgcaatcagaaaattaattatcttaattgttggtggtctcttaggcatggtattgatgatggtttttattcctttaactggtgttcaaaatatttttgtctttttgatgatgggattataccttggaatctttttaatcggaattggtttggtatcaaaaaaagtgattatgtataaaaatccccttgctagattaaaaatatgtagtgatggtattttaaatgccttgcgtgcaacgaatcaattagaatcttatcaatgtcttgtgaaaaccgagcttgttggagtgtatcatgtgatttatttagctggtggaacaggacatgataagactttatttgcaaagtgtgtgtatgaattttttgatgcgattgataatcaaagatatattctttatcaaccaataaaacaaaatcagatggatggttattttgtaattccagaaatcttttctaaacgtaaagaagatgctgaaatttttgcacaatatatgcgaaactatattggaaaatatcaagctatttatacaagaagtttagaaggacgaaaaattttattgaagggtagaataaaagctttggcaaataaacaagatcgtattgtaagtaagaaaaaagtaaagggagcattggaataatggcgcagataaactgcgtcattttcatgtgaaaaatatgttttgttgaatcagttccctttatcttaaaataagagtatgattatagagaggtgaagaatgatgtcagaaaaaaagaatttattattaaaattatttctttctacgctttatctgagtgcatttacttttggtggcgggtatgtcattgtgacattaatgagaaagaaatttgttagtgaatatcattggattgatgaaaatgagatgttggatttagtggcaattgctcaatctgcaccaggagctattgctgttaatggagcaattgttgtaggttataaacttgctgggattattgggattattgtcagtgtgacagcaaccatcttaccaccgtttattatcatttccataatctcggttttttatagtttctttagagaaaatatttttgtggctttaatgctagaaggcatgcaatcaggtgtaggggctgtcatagcatcagttgtttttgagatggcagctggggttttaaaagaaagaaaaataactttagtgattattatgctcatttcttttattgtgacatattttttcaatatcaatgttatttatgtgattcttgtttgtattggaattggcttaatacaaacatttatgcgaaagaaggttgatgaaaaatgatctatattcaattatttataagttttttacaaattggtttatttagttttggtggtggatatgctgctatgccgcttattcaaaaccaagttgttaatcttcatcattggttatcattgagtgagtttactgatttaattactatatcacagatgacaccaggaccaatcgcaattaattcagcaacctttgtaggtgagaaaattgctggggtgcccggtgcgattgttgcgacattaggatgtattatgccatctattattattgtaacaatcattgcttatttctatatgaaatatcgtgatttagattctttacaaagtgttttaaaaactttaagacctgctgttgttgcaatgattgcttcagccggtgtttcgatattagtgacagctttctttggtgaaagtggtttaattgttatgaagaatttaaaaattcaaatggtcgtgatatttgtcatttgtatggttttattaatgaagtttaagatgagtccagtctttgtgatgatacttgctggaatcttaaatgttatgcaatattttttactttcatcactctcgcttgggagtctatagctttcaactgattatttacaagattgtgtaaagtctatgttaagattatgttaagtccgtttgcattaggttagatatatgttaagtttaccttgtattaatgggaggaaaggtatggaactaacaaacttatttgccttattaggaggcttagcattattcttatatggaatgacaatgatgtcaaacggattagaattagcagctggaaataagatgaaaagtatcttagaaaagctaacaaccaatcgttttttaggtgttggtgttggggctttaattacagctttaatccaatcatcttcagcgacaacagttatgactgttggatttgtcaatgctggattaatgaagctagaaaatgctgtatgggttatcatgggtgccaatattggaacaactattactggtcaattgattgccttagatattacagcattagcaccggttattgcttttattggagttgctttaattgcctttgtaaaaaataaaaaattagatgcaattggagaaattattgctggtctaggaatcttgtttatgggaatggaaatgatgtcctcagcaatggcaccgttaagaagttcaccagaatttgtcagcattgtttctaactttgaaaatccattgattggtattttagttggagcaggctttactgcaattattcaaagttcatctgcttcagtaggtattttacaagctttagcaatgagtggtgtgattactttaccatctgctatatatgttttatttggtcaaaatattggaacatgtattactgcggtgttagcttcaattggaacaggacgtaatgcaaaacgtacaacaattatccatttgtcatttaatattattggaacaatcatatttgttataataagtatgttaacgccatttgcacatatcatgcaatcattaacaccttctaatattcctgctcagattgctaatgtacatacagttttcaatgttgttacgacaatcttgttattaccatttggaaaaaaattggtacaattagcttatatcattttacctgaaaaagaaggattagaagataaaatgactttaaaatatcttgattttggtatttttgaaaatgattatcatattggaacaagtgcaattgctaatacacaattatttaatgaaactcaaaatatgttaaatgttgcaattgataatgtgagaaagtcatttgaattaatgattgattttaaagaagaaaaattcgaaaaattacaaaagaatgaagattatatcaattacttaaataaaaatattgttgattttacaaccaatgctctttcaattgaatttccaatagaaggatctcaaacaattggtttattcttaaaagtatctgctgatttagaaagagttggagatcatgctgttaatattgctttaagagcaaagaatctttatgaagaaaatcgccatttctcgcatgaagcaatggatgaaattggcattatgagtagtttatgtactaatattttagatgaattaagaattttaaattatgatgaatttaaaggtattgttgataaggttgatgttattgaagataacattgataaaactcattatgagttctctaaaagacaaatagagagattaaagaaaaaagaatgtacgacagaaaatagtgttgtctttaccaagacattaactgattttgaacgtattggtgatcatggtttaaatattgctgaaagtttctataaaattaaagaagctgttgctgctatgaaaatggtaaaatctcaaaatgaagatttggaagtggcagtgtaatgaatatttatgtttatgagttcatagaatatgactaacaacttaataaaatgatatgttgaatatgtggtggagtctgtcataaagtttaatctttatttattcaacaagataagttttatataacttttattatatcttataaaacagactccttgatgagtctgtttttttgtagaaaggtcgatgattatgaaaacagttaaacaaaaagtcaatcatttttttaaacattcatctccacctcgattaatctgtttaggttttttgagtgttattttaattggagcaattatactgatgttacctatttctgttcgtgagggggctaaagttacttttatagatgctttgtttacatcaacaagtgcagtctgtgtaactgggttgattgcgattgatacagctgaacattttactgtatttggtcgtacagttgtcgctttgctcattcaaattgggggtcttggtgttacttgtgtgggtgttgcttttattcttgctgctggcaaaagagttggattaaaagccagaaaactgattaaagaatcatggaatctaggaagttatcgtggattgattcggttagtgaaacatgttttaaagattacattgttatttgagttagttggggctttattaagttttattgtttttgttaaggattatgatgtatgggatgcgatagggattagtgctttccattccgttgctgcttttaataattcagggtttgatattttaggcggattaacgaatttaattccttatcaaaataatgttttattaaatttagtgacttgtggattgattatctttggtggaataggatttcttgttattattgatgttaaagaaaaaaagtcttttaagaaattaacccttcattctaaagttgttattacagtcagtttatttttaattgttgttggaacagttctattgaaattaacagatcatgtgacatggttaggcgcttttttccaaagtgtatcagccagaactgcaggattttctacttatcctcttggaacatttagtcaggcaggattatttatacttgcaattttgatgtttattggagcatcaccgggttcaactggtggaggtattaaaacaagtacattgtttgttatttggtgtgaaatgagaagtgtcatgaaacatgagcattgtgttgcatttcgtcgtaagatacccgaaagtattattaaacaagcctttgttgtaacgattttatcattatgtgttgtgttaatcagcacattgttattatgtattgctgaaccgcattttacttttatgcaattgttatttgaggtaacatcagcatttggtacagttggattatcaactggaattaccccacatttaagtgtgattggtaaattgattattatactaacgatgtatgttgggcgtttaggagcattaacagttgtttcacttggaacttataaagagttacaaaccgctgtttatagtgaagaagatataacgataggataggtgagagaatatgaaaaaaagtcattgttatggaattattggtttaggacgttttggtatgccactagctaaaaagctagctcaggaaggaaaagaaattattgggattgatcaagatgaggaaagagttaaagaactaagagagtatagtgaatatgcatatgtatgtaaaaagatgacaaaagaagttctagaagaagttggtatttctaattgtgatattgttattgtttgtataggaagtaagatcgaaacaagtatcttaacaaccttgaatttgatgaatttaggggttcctcaagttattgctaaagcaactaccgaagaacagggtgaggtcttagaaaaattaggagctcaagttgtttatccagaaagggatatggctttaaaaattgctgaaaagattttaaggaagaacttagttgattatattgcaattggtaaagatgtagagattattgagattcatgcaacttctggaatgattggaaaatctattgttgaaatgagagtcagagaaaaatatgggttaaatattgttgctattcataatttaaaagatacaaaaactgatattgatccacattatcaaatgactaatgaagatacaatggttgttattggaaaaagaaaaaatgtgagtgattttattgatgattattcagcataaagatatgaaaaaaacgttgaggatgctcaacgttttaattttcattttggagacttatagataatattctttctaggtgtaaggcaagatagcctatctcagagtgagggatatcttgatgtaaaacttttgataactttaagcagatattttcagcttgttgatatgcaaaagggaatctttctttggtaaagtcactgatattcatttgtaactgttcatgagtttgaagtcgtaaaaataggaattttatatgattcataagtcgaatataagaaatagaattactatcaatttcaatttttaaatctttttttaattgatcaatactttcatgtatgacttgtgttgcttccattgactcataaacatgttcttttgaaatagcagaatgaacatgtaaagttatataacctatttcatcatcattaattgtttgtccagtcattttttggataagttctttaccttttttagcaacttcatattcatcaggaaataaaagctgaatatcttttgtaaatggatttgtaattgtcatcccttcattaagtctttgaatagcaaagtcaatatgatcagctaaaggaagtaaaatcttcgtatctactttatcaaatttttcagtggcatatctaataatttctgaagaaatttctatataaataggatttacattctttaaaatatcttgtgtttttttcttatctacatcttgttttaccattaaaaatgttttggtatttgctggtgcttcaaaaatatcattgactttcttttgaaagccaatgccttttgctaaaagaataacttcatcatttccctgtttagccagtatactattattatttagcacttttataatttgatatttcaatttcattcactccttaaattattttgtgatatgtaaaattgtttcttgtgtactcattataccatagttcttttctaattttaaaccattaggtagttttgttacaactaacattatattttcacttaaagcatgatctctaatataatgaagatcagcattccagattggttcacctagaccaattgtttgatcttgtttgactaataattcaaaaccttcaccattaagacttactgtattcactccaaaatgaagtaaaatctcacatccattgtttaatcttaaaccaatagcatgtttagttgggaaaatcattgtaactacagcatcacaaggagaacaaattagaccatgctgtggtttaatcataagcccatcacccatcattttttgagcaaatatattatcacatgattcactaatatcaacaacttcaccatcaacaatattctttaattcaactgattctattgaaactggagaaatttcatcaatgaaatcatcatctgttgttctttctaaataatcttctaatttagatttaatcacagaagcatgtggtccataaataatttgaatactatcaccacgtaataaaactcctgctgctcctgattgtttaagtaaactttcattaattttttcaggtacaataatatgagctcttaaacgagttacacaacaatctaaatcattaaagttttgacgtccacctaatcctttaacaatgagtcgatactgttgatcttctttgttttcttcaaaaataggatttatatgattttgctttaatggttgttcatcactgcgaccaagtgtctttaaatcataatggataataaaatatttaaaacttatataataaagaaaaaagtaaacaataccaatcggaattaataatacccaacttgttttactatttccctgaagaataccaaacatcaataaatcaataaaaccaccagaaaaagtaagtccaacagcaatattaaaaatatgtgcaatcatataagcactacctgctaagataacctgtaccccaaataaaattggtgcaacaaataagaaagaaaattctataggttccgttattcctgtcaaaatacttgttaaagcagccgataaaagaagtccacctacagtttttttattttcaggttttgcacaatgatacattgctaaagcagctcctggtaaaccaaaaatcataaaaataaattctcctgtaaaatatcttgttgcttcactactaaaatgaacaatatgaggatcagcaagttgtgcaaaaaagatattttgtcctccataaaccattgttccattgacaagcatagatccaccaagacccgtttgccaaaaggggagatagaagatatgatgtaatccaaaaggaattaataaacgtttaataattccataaagtaaagttccaaaataaccactatcagcaaccagatgtcccaaagagagaatcccattttgaacgactggccaaatataaaacatggcaattccaacaactaaaaaaactaatgttgaaataataggaacaaaacgtgttccgccaaaaaaagatagagtactaggaagttccatcttataaaaacgattatgaagataacttacaccaagacctacaataatcccaccaaaaacacccatttccaaactataaataccacaaacagatgtgattgttccactcaccacatgagtagcaataatattgtcattaagaatttgaccatcaatcacaagcatagaatgaattgttgtatgcatgacaataaaagcaataacggccgataaaacagcaacacctttttccttttttgccattcctaaggcaacaccaatggcaaagataagtggtaaattggcaaaaatagctccaccaacatttttcataataatgaacaatgcattaagaattgtttgatgtcctaatagactttctaaatgaaatgaagaaaccatggcttcatttgtaaaggttgtaccaatggcaagtaataagccagcaataggtaaaatggcaataggtaacataaaactctttcctaaacgttgtaatatggcaaaaatttgattcttcatttttccctccaataatgaaattctttattttatactaacattgaatacaatgagaatcaatgctatcatcattaataatgaaaaaggtagaagttcgacaataaatatcaaatttccaccttgtttttatttgttattaacaatcttgtttctttcttttgatgaataaagcagcaccacttgctaatcctaataataaagtatatcctagaatcattgttgaatcttcagttgtaggattttgtgatggtttttgttgagtagactcattgttttcttcatcaactgttggattgactttaacaagtgctttcatagcttcatttaattgttttgttgctaaatcaacagcttcttgcgttgcattttcatcattataaactttacgtccattgtctaatgcaacaataagaccttgataagattgttgtgtatattcagcttctcttaatgcttcagcttttttaatagcatcagctaataattctttattaacttttacttcaacagatgttgtaggaattgctaatccattttgtgaagttgtttgagttgaagttaatgtattttgatataataagtagaatgctgaagcactccagctaaagttacgtgtatgtaaaccttcaccagtttcaggattatagttttcatggattggtccagtaccaactaatcctttacaatgatcaaataatttaagtgttgtttcttttgcttcatcattatatccataattttgtaaagcttcaacagcatataatgcttggtctaaccaaacaggaccacgccaatatgtacttggattatatttatcattatcttttgatgctgtagggaaaggaacataagtattgaatttacctgcatccatcatattttttacaacttgagcagcttgttcttgagttgcacattttgcccataatggaatccatccttcagtacctttaccacgattaactaatagttttttaacagaaccatcttcatttgtttgaacatcataatagaatccagtttgttcatcatacatttgcgtattgatgtaattacctaattttttagcttcttgttcatattttttagcatcatcattatatcctaattcttcagccatttcttttaagaaacctttttcagcatataaataagcatttaaatcaacagattcttgattaataacataaccaacaggttttttagcatcatttcttacagtaaagattttaataccaatatcatcttcaccattaccttctaagtcaaaacgagtcgcattatccataccactttcccatgcagcagcttctacaccagcatcaggacaaacaacgcgttcattatttttatcataaacaaaaccattttcatcaacagttcctacaccttcaataacttgacctacttcataatcataatcagtccagttatagcatacatcatgaaccattccaccatattcagcaataccgtttttatcaatatcacggttagtataccaccagttatgataagctactaattttggatacatttcttttaagaattctttatctccagtttgacgataaacgttttctacagcccatgcagctaaagcaggtttagagttacgttcattccagtttccaccgtctccaccacgatcttcattttggttatagaagatacaatcaatgatagcaccagcatcttgaggacgtactttgtcatctttagtaatttgatagtcgaataaagcacgaacattatttttagctaattcagggttaaattgtgtagtagcaacaacttgtttccaagaatcccatgcccacataccaataaaccatttgtatgacattgaagggacaataccatcatgtttaatagcaccagcagcagagaaccagtttgtcatcaatgtttccattgatttaacagcagctttttgataatttacatttgtttcagttgaatttttgaaaattgtatcaacatatccttgccaacgtgtattattgtcttggaaatgttttgaaggactttttaagatgtcttgaacttttaattgttcatctgttctttctttatttgtataagtaaaactttgtgtttgatatgttttataactattacctttagcgattgtaacatcattattttttgttattgtatatgataactcatcatcagcaacttgtgttgtaatgtttttatcatctaaaacaatatcaaatgagttttcctctgttgtcatataattccaagtacttcttttttcaataaagttaacttttacatgattatcttcttgagataaagttgttcccatttggttattttgtgtgtcactattataataagtataaatatgaccatcccaagaaagctttaaagttaagtcattgtctgttttattaacaatttcagtttcaattaaagctgtacggtttgttgcaaagattaatttcaattttaatgttaattgatctaaatcataagtttgttctaatcttcctggataataaacactattaactttagcttttgctaagtcaatatcagttgtttcaccattaatcacttgttttaaattaattttattaattgaatcagataaattgacaggatattcttcagcgataataacaggaccagcaaatcctccatataaatttttagcatcctttttatgaagataatatccatgccaagcacccatatcagaaaagttgttaaattcatttgtgctgtaatcactataaattgcttcttttggattagctgttacatctaagacattaccaaactcagttaaatctttagttttttgttgagcttttgtaattgtaactgatgacccaatcatcatacaagataatcctaaaataatcccttttttcaagattcctttaccgttcgtattcattgattttctccttctttgatttcttaaaagttggtaggcaatggatgaacgcgcgctttttcatcaaaaaaagacattaacaatacaaaaatgaatatataaagaaactctaatccttatatataatttctgtatagttaatgcctgcattaccagttacacactatctttcaacttttacaggcaatatattatcattgaaagcgattactgtcaatcgtttttttggtaaatatgtgaaattttaggaaaagatgttttgatggaaaagtgagaaaatatggtgtgaaaaatttttggtttatatttttatttatctttttaaaatattgtccttttaaggaatttaaaaaagtgttgataaattcgatgcttttttgattgtgaaaaatcacggtaaatgtgataaatcattgaagaatcacccttgtccctaagtcgggtggaagtattgaaaacgtttttgaaagggtttactataaacgtgcagacaagaaaagggaggaaaaaaagagttatgatgcaaaaaattcaaagattcggtggggcaatgtttacaccagttctactctttgcattcgcagggattacaattggaattggaacattgtttacaactgaagcaatcatgggtggacttgcaagtcctgatggtctttggtatcaatgttggaatgtcatcttacaaggtggctggacagtctttaatcaattaccattattattcgttgttggtttacctattggcttagcgaaaaagcaacaagccagatgttgtatggaagcgttagttctttacttaacattccaatacttcttaaacacaattttagcacaatggggaggtaactttggagttgacttcgcagctgaagttggaggagtgagtggtctaacaatgatcgctagtatcaaaacattagatatggggatgattggagcattaatgatttcaggaatcgttatcttcttacacaatcgttattttgatactgagttaccagaatggttaggaacattcagtggttcatcattcgttgttattgtgggattcttcgctttaattccagtggctttcttatcagcttggttatggccaatggttcaaagtggtatgagagctttccaaggatttatttctaatgcgggagctatgggtgtatggatctttatcttcatggaacgtatcttaattccatttggattacatcacttattatatttcccattcttctatgattcagctgttattaatggtggtgtttattcagcatgggcaaatgctttaccacaacttgctgcaagcagtgaatcattaaaaacaatggcaccttacgcttggccaacacttacaggtttatctaaagtctttggttgtccaggtatcgctttagcattctactttacagctaaagatagcaagaaaaaagaaatcgcaggtttattaattccaattactttaacagcaattgtttgtggtattactgaaccaattgaatttacattcttatttatcgcaccagtattattcgttgttcatgcagttttagctgcaacccttgcaacagtcgcttacttatgtggagttgttggtgtcttatcaggtggtttaatcgaaatgtcagcattaaactacattccattaatggctagtcactggccaacatatttaacattattagcagtaggattaatctttacaggaatttatttcgttgtctttagattcttaattcttaaatttgacttcaagacaccaggtcgtgaagatgatgaagaagaaatcactttccatacaaaagcagatttcaaagaaaaacaagcagcagcaacaagtgctggaagcttagcagaaaaaatcttagaagccttaggtggaaaagataatattgtagatgtcacaaactgtgcaacacgtttacgtgttaacgttaaagatgagactttagttaaatcagatgcatattttaaatcaattggtacacatggtatcaaagcaacaaaaacaaatatccaagttatcgttggattaaaagttccaagtgttagagaagattttgaagctttattataaagaaagtaggtagaaaaaatggctcgaaagaaagaagataaacaactcaaaaaattgaatcgttattttatgattacaaaagtgttcttagcaattactcctttaatttgttatttatatgtttcattaaaagcgatgttgaattcaataacgtttcaagaagtcttagtaaaagatccaagtatgacaattgtatttctcattgcaatgttaaatccttatattgcttaccttgttcaattaattcaaaagaacttaacaaaaggaaatacacaatttgcagttattaatatgggattacttttagttgctgaagctttaactttaaacttattttacttcatgatgttgttatttgtattctatcgagctatcaactactacaacattcaagttttcccaacaatcaattcatcaactatcaagcaattcttctataatggtggaggaagtatgcttgtcatgttggtaagctgtatcagcttatttgcaacaataagattaatgtaaaaaaaaggagagaaagaaaaatggaaaaaaaatattcagttacagttgcaggtggaggtagtacatttactccaggtatcgtcttattattattagatcatcaagatcgtttcccaattagaaaaattaaattctatgataacaatgctgaacgtcaagaaacagtcgcaaaagcatgtgaaatcttattaaaagaaagagcaccagaaattgaatttggttatacaactgatccagaaacagcatttactgatgttgatttcgtaatgtgtcatattagagttggtttatatgcaatgcgtgaaaaagatgaaaagatcccattgaaatacaatgtagttggtcaagaaacatgtgggccaggaggtattgcttatggtatgagatctattggtggagttatcgaaatcttagattatatggaaaaatattctccaaatgcttggatgttaaactattcaaatccagctgctattgttgctgaagcaacaagacgtttaagaccaaattcaaaaatcttaaatatttgtgatatgccaattgatcttgaagaaaaaatggctaacatggttggattaagttctcgtaaagaaatgtctgttggatattatggattaaaccactttggttggtggcataaaattgaagataaacaaggtcatgatttaatgccagctattaaagaacatatggctgctaatggttatgctgatgctttatctaatacaaaccaacacgttgaacaaagctggattgaaacatttgctaaagcaaaagatgtttatgcattagatccagatacaattccaaatacttatttaaaatattatttattccctgactacgtcgtagaacattctcgtaaagattatacacgtgctaacgaagttatggatcatagagaaaaaattgtttttggagcatgtagagatattattgaaaaaggaacagcagttgattgtggatttgaagcagatgctcatgctgaatatatcgttgacttagcttgtgcaattgctaaaaatacaaaagaaagaatgttattaattgttcctaatgaaggagctattgaaaactttgatagaactgcaatggttgaaattccatgtatcgtaggttctaatggatatgaaagaattgttcaaggagctattcctcaattccaaaaaggtttaatggaacaacaagtttcagttgaaaaattaactgtagaagcttggattgaaggaagctatcaaaaattatggcaagctatcactatgtcaaaaacagtaccaagtgccaaagttgcaaaacaaatcttagatgaattaattgaagctaataaagacttctggcctgaattaaaataatatgggattctttaagaaaaaaaataaagcattttatgcaatggcaaatggaaaaactgtcgctattgaagatgtacctgatgaagttttcgctaccaagatgatgggagatggaatagccattcaacctaatgttggacaaatctattcaccatgtattggtaaggtgacaatggtcatggacaatacaaaacatgcagtaggaatcgaaaatgaagatggaatagaagttctgattcatgttggtttagatactgtgaatcttgaaggggaaggatttgaagtctttgttaaagttggggatgaagtgaagcctggtgatttattgatttcttatgataagcaaaaatttgaagcagatggtattaacgatataacaatgcttgttcttgttgatccaaaaaatcatacagtcacaaaatatcatgcaaatgaagatgttcaaatcaaaacatcacctattatagaatataaataaggagctcaattgagctcctttttcaacataaaacctaaaatataaacattaacatctctttcgttaattaatatatgaggatattcccttaattgtaaatctattaaatgaatatctacctgatgaatatgatcagtcaaaggaaaagtcatttttatataaaattgttgatccataaaaccatgttgaattgataataaagatgattcgttatcttgacaggcatctatcacaatatccatcatcttattaagaacagtatagtaaatatttttaggtagaggacattgataagcgtcttttgtataacttaaatggatatgatattgttcaatctgtgcactatattgataaagaatataatctaatgttgtatttccagtcattattggatttgtttttttatttagcagattgatctgttcatctataaaattatcaatcaaagtattttgattctgatttaattttttaatatgttgtagaatataaagattatcgtgttgtgattttgataagactttcaaggaatgttctacttggagataatttttattattaagtttaaattcctgaatgatcatctgattttctagttgttgattatgaacagtattgatatattgaatagctctatatatagagattgttaaaataataatacagagaatcatgatatatagttttatgttaattgtatcttcataaaataaggaatcaaagattaaagtatagagaataatcaaagaaagtaaagctatatgaaaagaacgattctttatattctgactttgaataaacttatttaaatattgtggaataaatataacaaacaaaaggaagattatttttgaaacaataacaagtatgacataggataatgagttgttaaaaaatacttgattcaacataattgtaagtgtatttgaaaaaagagaaaacgtgtcaacaagcatactgataaagagattggaaatattttgttgaggatttaatatctcactcatgagaaaaagaataacttgcatagacaatgtataataaatttcgcttaaagaaaaataattatacagagagatatttaaacataataaaaaagtgaaaatcaaaattattttgtaagaatttttaaattgcgtacgaaatatttttgcaataaatattgaatataataaaccttcaatgagattaatgcttaaatcaaatatactcatagttaaatactccttaacttatatcgttgataagaagattgaaaatctttatatcttctttgacttattggtattatttcattattagtcagtaatatattcaagtcctgaacagatatgatataagagaaattaataatataagattggtgtacaagacaaaaattattattaagttgagttaataaatcactgagacgaacacgtattttatatatatttatttgtgtatgaatataaatataatgtccaatgttttcaatataaagaatatcatgataaggaatacagatattttcattttgataggttatagataatgtttggtttaattttgaatagagtctttctaatgtttttatcatatcatcttttaaatgatgttttcttacaaatgaaaaaggatgatgttcacaagctagatacgcaagatcttctcgatgagaaacaaaaattataaatgtattcaaaggaatggattttgctaaatcaaatccagattgctgaggcatatcaatatctagaaagataatattatattgatggttataattaaaattagtaggattttctaaataatcaatatgataattaaaatctttttctttaaaatagatattaataatatttttgatatcatcaatattttcttgattatcatcaacaatgagtattttattcatatcatcacctacttatattaattatatagaaaaaatacgttaaagtatatcgtttctaagaagtctattttaattttgacaaaaagactgcaattttgccaaatgattgaaataagcgaacttttcccatataattaaattagaagaaacattaacttaatttttagaaaagtctataagataatttttaaaaacaattatttcaataacgcgttgtttcagtataagtatttaaaatttttgttcagtaaaagcattagataataaaacaaatcaatctgtagaatcacgagggatggataatacatgattgaggcattcttaatggaagtagtgaatcaattttacgaaattatattttaataaaaatgaattatgttacatatttttcctataggacacctacatggagcttatcaagttcatactgttagaaatgtatatattcaagattcatttaactttattattgaaagagggatggaaatgttaactttaaaagacattcaattttgttatcaaaaacctatttttaaaaatacaacaatggagttaccaagtacatccttcgcatgtattcgaggaaaaagtggtagtggaaaaacaacacttttaaaattacttatctttgatttaaagctagattctggtgaaatactttataatggaaatgaaattcattctcaggaagattttctatttaatcatataagttatattgatcaagaaggacaatttttccctaatatgaatatttatcaacacttttatttctatgcacaattacatggaataacactatcaaaagaagatgttctatactatttaaaagaagtcaatttagaaaatattgaggtgaaaaaatctccttcttatctatctacagggcaacgtaaaagatttttaattgctttagcacttatgatgcataaagatatcttattgttagatgaaccaacatcttcgttagataatgataataagaaaatattaatcgatttgctcaaaaaattatcacaaaagatattggttgtttgtacatcacatgatgattatttaataagtcaagcagaccagatatatacaatcagagattatcaaattataaaagaaaaagaaacagttgtaaaagagttattattagaagaacagaatcataaacctcaaaaattaaattattataaatataaaaatttaaagcttaaaattatgttttctattatatttataataggtgttattacaattgtaatggtatcatttggggtaagtgttaatgtgtttttaaatttagatgtgaatacttctactcatattaatgaaacaaatggtttgattttttataaagttcctgatgctagatggttagatatggaggaatatgattttattgataatgatgatattagaaatattcaagatgtagaaggtattaaatctgtgacaccatattatgttgttgctgattggcgggatggagaaattaaaacgatgactgttgaaaattcatctggcaaaaagaaagaaatctcatattattgggaaaaaatgtcaaaatattataataaggattggtatgccaagattgctatattttcatatgatcctttacaacatatacaattaaatggaaaagatattcaagggacttatattgatgaaaattttgcagattttattaatgaagatatagacaaaggattaaagttatcattgaattttgaattcccttatcaatattttgaaacaaaaacaatgtatacagaaatgaatgaagaagtaaaggaaataggatgcttacacaaagcatcagatattgaaataagtgtagatggagttttacctgataatgtatataacggaattgatggaacggctatagactctagtaattttttaagaatttatatgcctgttaaagaagtgcaaagtttacttaaaaataatgcaatgaatcagacaaaacatatatatgatcatcctatgacttatttaattttgtgtgagcaggataataaggaagatatcaaattaaagatagaaggaatgaatgaactttatagagtaaggtatcaaaatttgaacacatatcaagttgttgaatctggtcattctattcattatacgactctctttattgattcaattctgatcttagcagtttcgttactttgttattattacattcatataagaaaacaagagattgttattttaaaacacaatggattaaaaaataaaatcaaaagatattatacaattgattatatttttttagatacaatttggtttgttgtttcgattattgcactggttatttatataaggtggagtggctttataataaattggattcttatatcaggtttatgggtatgttctacagttattctaattgttttatttactttagtgagtcaattgtcaataagggcaattattcatagatattaaagttctttatttcatttgaattaacaatatgaatgaaatattatctaagataatatgggttggagaaagaatgaaaagaaaattatttgtatagttgtcttatgactactttttcaatggttgctgtttttgcttatggaagattaagtagtacaactttgtataaaagttcgtccattgatgcagtaactgattggataggatatgattacattgctaaaaatgatgcttcatcttcagcgttaatggaagctgctacttggacctcttgaaagggtgcgatttttcctaatacgaaagaagcagttgtgacaatatcatggcaaaagtctacaccatttagtgattcacaaaaatatatcaatttattgacttgttttaacaccaaaagcaaaaggacttgtttctggaagtggaactataacacttggtagaaatccccagtaaagaaattgaagaaaaatagtaaaaggagggaaggatgaaattttattcattctttcctgttttactttaaaagatgggagtggaaaatttatggagaaattaaaagttcatttacgtttgatgaaaagctttccaaaaatttgtggtgtgcttttgtttggggtatctattttcatgatttattttggatatttgatttttttaggactggcaagctttgatgttttaggattcagtagtagagtaaattatatattttgtgccattttaatggtaacttcttatcttttgttgacaggtgcaagtaatagccaacaagatgaaagtatatactctttagataaaatgaattatagttatcaaaagaatatttatgttattcttttgataatgattataatcattaacttaattatggcttgtgtacttattattcatgattggcataatacttattttttgacacattttcttcagccttatctttataacttattgattccacaagtgatttgtttatctattgtttttattttatcattgtttaaaaatcatgttatgcacattgttatgttgattatctttatctttatgacaagttcattttctgaaatatcttggccgctcaaaccatcgtttcctactgataagatttatcaatttatccatttaccatttgaattgttttatcaaaatggtgaatggggcactgatgttatgtatggatatcaatgtgaactgagtcgtttatggatatttataatgtggggaattttattattaagtctttattttattaaaatgaattggcgtccattaaatcaatcaaatatatataaatggggatataagattttgcttgttttgactgtgggaagttgctttatggtatatttgccagaatcaaaatatcgaatcaatgatgcctgggatggttatttctatgatatacgtaaagatagaaatcttacagagataaaagatgagaaaataaattataagatatctgaatatgatttaacagtgagtataaagcgaatgcttggtgttgaaggaaaacttcatttagaaagttcaattcctagaaaagattttattctaacactttatcaaaaatatgatttaaaagaattaaaaagtgatgcgaatatgacttatcaaagaaaaggtgattatatttatatacaatttgatcaacctatttctcaaattgatttgaatatagagtataaagggtatcatcctattttctattcaaatgctcaagcaactatgttaccaggatatttttcttggtatccaatgtgtggtgaaaaacagatttttataacatacgagattaaacaacttgatggatatgatgcaacggaatttggatataatactttaaatcacattgataatgcaaaaataacacttcatactgataaagactatataacaaatttaactaagaaaagtgaacatgtttatcaaggaacaagtgatagtatcagtttatttgatggatatattgagtctgctgattatcaaaatataataagttatttaccattaaatggaactctacaatctaaaaaacaatatctaaaagatattgaagataattacttagaagaattagaaaagattgaaaagatttttgatgtatctatggaaaaatatcgagctaaaaaaattattaatgtgactggagatatttctagaaatacaaacattggagaaacagcgatttttgatgattatattataagcagctatatgaatattagatcttctatactttgtggaattgttgaatcatcacctaaaaaaacattactaacttatgctatgaaatggtgtcctgttcaagatgatctagaaaaatattatcaaaatcttatcaatagcataagtaatggagataataatattgaccaaataaagaaaatcaatgcaattgttgataagttaggaacaaaacgttttttacatgagttatatgaatatatgtttgatgatacacctgctgatgatgaaatgttcttagaaaggatggggagtctatgattacaattcaagatattaagaaaagttataagaagaatgttgctttagatgatgtaaatatgactttggaaaacaaagtctatggtttattagggcctaatggaagtggaaagacaacattacttagaattatttctggtttattgaaagcagatcatggttctattgtttttcaagataaatctatccaagaggcatctattggttatttacctcaaaagtttggtgtttttaaagaattaagtgtttatgaacaattagagtattattgtattttaaagaaaattcctcaattacaaagaaaagagtctattcaacaagttttagaaagtgtcaatttagaagatatgataaacagacattgtaaagaactttctggaggaatggtcagacgtttagggattgctcaaacatttctaggaaatcctgatatcattcttttagatgaaccaagtgcgggtttagatgttgaagaaagattgcgttttaaacgtattttatcagcaaaagattttccttttcctatcattatatctacacatattgttgaagatgttgaatcaacatgtgatatcttaattgttttgaaaaaaggaaaaatcatttatactggaacaccagaagatatcttaaatcatgctagaaatcatgtttatgaattatctgaaaaagattatcaaagtatttcttttcctcattatttggttaagatttctggtgaaaaacaaaaaacctatcgtattttatgtgatgatattttaaatgaatcatggaaaagagaacctgagatagaggacggatatatgtatttagttaaaggacctttccatgaagtatgatttagaattaattatatttgatataaaacatagaaaaataatatatttgatacctgttctctttgttttgctgatcttttttccatttatgaaaaatcaagctgaaaatatcattttaactggaggtgatccatttatttattttcaatattttcaaaagacttttcccttgcttatgatttattatttatatttgttttttagaaactttttagataatgaatctatggaagcaattcatgttatgaatatgaaaaataaatttatactgattatttatattttatgcttttttcaaataattttagttccattttatgttctttcatttatatattttgatttttcattggttttaagtgaactcttgaatcttaattttatcttattctttttatcttcattattttattgtttgagttattgttttgtttcaccaatcgttgctttaggaattattttactgtattgttttgtatttatatcattattaccatttatttcttatcttaatgtatttcatataaatgaaccaattttgggaatgactaaagaatattatttaaaacatattatagaacttatcattattatttttattggtataaaaaaacaaagacattttttataaggaacatgtttttgtcttgcaatcattcaattttatagatacagaggactgaaaataaaaagttcgtctcgtcttatgaaaatattatatttattgagttatttgagacttatcagtaaataactttgtttttgagcataaggataccttatttatgatgattgtgataatagagaattgaatatatttgaatttaatgcacctttaagtatgatagagcttatatttttaaaagagattaaagatatattttagatgtaaaggagaaatgatataatgaagaaaatgaaattattgattttaattcttattccatttgttgtgattgggggattttatctttttcaagtttattctcataaagatggagattattattcagtgtctgaatttaatgaaaaaacgaatttaaagttttatgatatctatgattttgatgaatatataaataaagatcatcttgaattactttcacaaaaagatattaaaattttttgtccagaaggatcagatttaaaatctttaaatatgtattttgttgagactgattctactgaatatacgtttgaaataggtagtaaaaatatagaacatgaggatgaatatgaaaaatattctttaaagaacgggactctttatacacatttatatcctgaaaataagattcttgtaatatatagtcaaaagaacttttctttaaatatatactgtaaaaagcttgcagtattagataaaaaagaactcgattcaaaaattataaagtatatagaaaaaattaatgaattatatttataatttgataataaacaataaattatattctcatctcttttaaaataaagaagtatcattgaaactaataggttaagatgatacttttattgattggagtataaaaagaaaatggtttatgataagataaatataatcaaggagaaaaattatgacaagtcaagatattatagaaaaattaaaacaagaatcatcagaaaaatataaagcaaatgttataaaaatgggaattcctgaagaaaatagtataggtgttcctacatcacaattaagaacaatagctaagaatattggaaaatcaaatgaaatagcttatgaattatggaatagtggttatcatgatgcaaaattattagctgttttggtatttgaagtgaagaagttatcttttcaagatattaatcaattaatgaatgatgttatttcttgggatttatgtaattttatatgtaaacaaatgattatgaaaagaaaagattatgatgattttattaaacagtggattgattcaaatcatgtatataaaaaacgggcagcatttgttttgattggaagtgcagtgattaaaaataaaactattactcatgatacattagatcaatatttatatctcattcaaactcatctggattgtgatcatgaacatgttaaaaaagctgtatcatatgcattaagagaaattggtaaaaaggattttgaatataatgaaaaggttttattgatggtggatgaaatgttgcaaacgcaaaataaaacacaagtttggattgctagagatgtgaaaaaagaattagagaatgtcgttgaagcaaagggtagagaacgtttgatttcacgtcaatcaaagatgggagaatcttaatgatgatagatgataatcaacaacgaccacaacttgataagtcattagatagtcaaacttttcttaattactattatttaaaagaggaattagttgatttctgtaaacaaaatggtttaccaactttaggaaacaaagttgacattacaaagcgaattgcttattttcttgatactggtgaaattttatcttcttcaaagcctgtgaacaaaacgattgttgtagagaagatttgtgaagaaagtttgattgaagaaaattttaaatgtagtgaaaagcatcgggctttctttaaagaaaagattggaaaatcattttcatttcaagtcccttttcaaaaatggttaaaagcaaatgcaggaaaaacatatcaagatgcgattaatgcctattatcagattcaagaagaaaagaaaacaaagaaaacgactattgataaacagtttgaatacaatacttatatccgtgatttttttaaagataatcaaggaaagacattacaagaggcaattctttgttggaaatataaaaaatctaaagctggtcatcatcaatatgaaaaagatgatttaaaggtacttatcaaaaatgaagaagatatatcatttgattagcttaaaatcatgatatttatataaaaaatacgatataataaaaaagcaatctcctttagaataataatgaaaggagattttttacatgaaaaaacataaaacattatgggttggtatgatttgtgttttcgttccaatcctaataacaatatttcttattctttttgtttttaatcaagtgggaaaaatgggagaaaatgagatacttcataaaacccaaaactatgaacaattgtctcaagattctttaaaagaaacaacagtgttctttggtgattctattactgaattatgtcctgttgaagatttatatgcaacatatacaagaaaaacaggagtacctattatcaatcgaggaattagtgcagaaacaaccgattcaatgcttaaacgaatcgaaaagactgttcttgtgatgaaacctaaaaatttagttatgttaatggggattaatgatattgctgcaaaagtagataatcaacagattgtcaacaatatcaaacaaatgataactttaaccaagcaacaaagtcctaagacacatatcattttacaagctgtttatcctatcaataaaactgatcgtgaatctttatttgataagtttcaattaagagatagagataatcaaacaattgatgaattaaatgaaatgttagaatctttagccaaagaagaaaagattacttttttaaatgtgaattcctatttaatggataaaaacaaagagttaaagaaagaatatacttttgatggattacatcctaatatgcaaggttatttagcaattagggatgcaatattaaatgttttagattaatgatcttttaaatgagattgttgatattgtttaggagtcatgtgtttatattttttaaatatttgaataaaattactttgtgaactataatttaatagacaactgatttcaatatgactcttattcgtaaataacaataaacgggcagcttcgtctgccttttttctttgaatataatgagtcattgtttccccaacttcttttttaaaagctgcagaaagataactttcagataaacctgtatgttcaaccaaatgtgataatgaaatcttatcataaagatgagtatctatataatgaatacatttatagacatgtaaagaataatgatcttttttagtttcatttaattgatgataaaaatcatagatggattgttgaaataaagtaattaattcttgaatattggtgatataagaaagtttatttaaagtagcatctgacaaagaaaaagctaattcacttgaaacaccttcttgaatattaatacgagtaatcagagtgataaaactaacaactttatagattaaatcttgtaaaatattttgtgtcagaagttgtgtatccttgatatttatttgattaagtaatgctttcactttgtaaaaatgtccatcttgataagcttttaatagagattgttcaaaatgataataatcaggtgtttcctgagtcattcgacgatgtgtcaaaatatcgtcttttttctttacttgtttagattgaatataatccacatgaatagattgtaatggtaaatattcatgagttgtcatttcatataacattttcacaaaattttgaaaagccataaaatgaagggatgcaatatgtgaacgaatcattgattcaggtacaatctttatccagctttcaggaagattttgatgagggttttgtaaatcgtttaatatacaagcacaaacaatcatatagtcttgtttttcataagtgacttgcattcttgcataagcaatactatgatcataaaccaaaatatgaacttgatgatatgtcatgaggaaaacatcatgtaaaaattgtttcatatcaataattgttattttaggatgaataagttgtaaatctttatcaaagatgacacaaggtatatgtaatgtattatataactcatcaataatagaaatcagtgttttcataaatactccttaaattatagtaaaattttgatatagacagtaaaatatcaatacaaataagacaatcattattatatactaaatgcgttgagaaaacaatgtaaacacttacaaaaaaagaaaggggacaaaaacatgggattgagtaagaaaaagaaaataatgataggaggagcaacagcagctatattggttgttggatgtctttctggaggtgggatgattttaggtacacttcaagatggggcacatcaattaaatagtggcgccggagcacttcaagatggggcacaaaaaattgtcgctggaacaacatcattaaaagatggaagtcatggattgtatacaggtttgagtcgatatactcaaggagtcagtgcattaggtctaggggcaaataagttaaatgaaggaatggaaaaatatactggagcagtttctttattaaaaaaaggggcagatggtttgtataatggtgtttatggttataccggagcagttgagggtatgcataatggaattacagcattaaatcaaggtgctggtgttttatcacaaggaacaactggattatctgaagggacaacaaaattgaatgatggaacaaaaactttatatcaaggtatgaaagtcttaaatgataattctgatgcattattagcagcaccagatatgatggtagaaggattgactcagttaaaaggtggactctcacttgtaccaagtgaaaatcaagttaaacaattaactgatggttcatctgctattttgacaactttatcaaaattatctgatggagccacagcagttgatcaaggtgtagaaactttaaaaacaacaattcatggattaaaagaaaaggcatattcaaatgaatctttaaataaatatgcaagtatgatggaaaaaaatccaacattagtgaagttattattaggaacattaaatgaagatcaaaagactgaaattatcttaggtttacttggtgtctatagtgcaacaaatacggtattagatggggcaacaacttcggttgaaggaatgcaaacattatcatcaggagtatcacaaggaatgacttctttaaatgaaaaatatggagtgcttgatcaaggaattcaaagtatgtcagctttaccccttgctgctcaaaagatgggacaaggtattgatggtatgattggtgttattcaagaacaaaaagtaggaatgacaacttatgtgaatggtgttcaaacagcttatcaaggaagtgcagctttatatagtggaacacaagaattaaaaaatggtacaacaactttaaatcaaggtgctcaaaaattaacgagtggtattcatgaactttacaatggttcttcaaagttaagtcaagcaggaacaccgttgaaagatggaacatttgctttaatgactgggttaaatcaacttaatcaaacaagtacaccattattaatgggaatgaatacattatgccaaggtgtccaaaagttagatgatattaaaactgatttattaaaaggtgcacaagcaattaaagatggaaattcaggtgtaaaagatgctatgaatggattgtatgaaggaattaaaacattgaaaaaaggaacacatcaattatatttaactgttggtggtaaaaagaagtaactctcttaatggagagtttttttcttgaaatcttaagaatctaatataaagataaaaaatatgataaaaacaaaacatagactttgttaaactaaagacataaaggaggaattttatatgttaggtattgccttatatccagataaaacaaatttaagagatgatcaggattatcttttaaaagctaaaaaatatggatatcaaagagtttttatgagtatgttacaaatcgataaggatgatcctaagaaatctattcgtcgtttaaaagaaagtattgcgtttgctaatgaattgaatatggaagttacacttgatattcatccaatggtttttcaatatttaaaaatgaaagaagatgatttaagttatttttctcaattaggagtcaaaacaataagattagatagtggttatgatgggaaagtagaagctatgatgacacataatccttatcatatcaatatcgaagtgaatatgagtaatgaaacaaattatcttgatttgattcattcttatcatccatatcgtcaagctttaactggttcacataatttctatccgcaaagatacactggtttatcattagaaacttttaaacgctgtagtcaaaagtttatagattatcatatttccagtgcagcttttttaacatcacaacatgcttctgtgtcaccgtggcctatttctgagggattatgtaccttagaaatgcatcgagatttaccaatagatgttcaagcacgacatatgaagatgttagggatggtggatgattggtttattggaaatgcttatgcaagtgatgaagaattaaaagctatcagtgagatttatcaatcacaaatagatattttacatattaaattatttgaggatgtgactgaattagaaaaagaaatgttattgaaatatcaccaaatttatcgtggtgatgcttctgaatatgtgattcgttcttctaaaaatagagagcgttattataagcaagatttacctgctcatggaaaaagcgatattcatcgtggagatatcttgattttgaatgaagattatggacaatataaagcagaggtacaaatttctttaatggatcgtccttatgatccaagaattaatgttgttggtcatattttagaagaagaaatgattttaatagattgtttaaaaccatttcaaagctttcaatttcaaataaaggagtaaacttatgaaatattatgcaggtattgatattggtggaacaagaataaaaatggggattatcaatgaacttggagaagttattgttaatgaaaatgaagaaacaaaaaaagaaaaattagaactctttactcaaattgatcattttataaaaagacatccttatcaaattgaaggagttggattaagtacaccgggtgttattaggagtgatggatatgcacaaactagtggcgctattcattgttttttaaactgttatgtgcaacaagaattagaagattttttacatttaccagtgattgttgaaaatgatgcaaagtcagcagctatggcagaaaaatggataggcgccgcaaaagatgaagattcatttgcctgcttaaccttaggaacagctgttggtggtgccatttatatgaatggacaattggtgagaggacttggtggcttagcaggagaatttggagttgctttgtcaagtttgcagccaggtgattataatgagcattctttttcttatcatgcagcgacagttgcaggactatgtcgtgagtatagctatagtgttaaagaaagagttttagatgcaagagtgatcattgaacgaagccaacaaggtgatgaagttgcaaaacagtgtttatctcatttttatcatgctgtggcagtattatttgtaaacattgcagtcatgattgctcctgaagtaattattgttggtggaggaattagtgaaaatcaagaagttatggaagctatcaaggaagaatatcaaaatatttgtaaagattatcatgttttaagtttagtagaaatgcctcgtattttaacttgccagttaaaaaatgatgcaggtatgattggtgcagtctattcttttttaagaagatataaaaaaataaatgatgggaactctatataatgaattgtatatagagttttattttttttaaagtttgatttcgttgtttattatattgaagcattatataataaagatatgcataaaaggagctgatattttgaaaaagatacaattgatgagtataattgttttgattataactttaattataatgtgtgttcactggtttatgagtcctttgacagattgggttattagaatagatggaattattatgatggtgagcttacttgttgttacttatagtacagctaaatttaagaaagatgaatcataattgctgatatgcaaaattgagtagaatgtatctttagttttaagagataatcattttgtgagttgggaatacttgaaaaggcatagtgaatatgctattatagttttgtaagtttataataacctattgaaagagtgtgtattcacacccaaaagaaaaccaggagctgctactcctggtttttggttattcaccatgcttcttgcacccgtctaaccatttgccgatcatttcaatacaaagattgacaatgccaccagccgtaacggcagccaagaagtttataataacctctatcatgcgtattcacctcctccacattgctagtggctgggtgataagcagattataacatggaacaaacaggtgtgcgtctcaacttgatgacaaatttgttccacgtttttctcatgaaaaataataaaaatacctaaaaaacaatatctttatgagacgtttttgaaaaatagatgagaaaataatgagaagtgaatacttttactaataataaagaattgaaatattcgtttttttatttatattgttttaactatgggatggtgtcataataagaataagtcataaattgtaaaggagaagatagaaatgggtgcatgggattttgctgtatttgatgatgatacagcttatgatgttttagatgatcttaaggaatcatcagatattattaaggatatggaaaagtattttgatgatgttatagaggcagactatgtggaatatgaagaaggttattatgctttggtttcagctgcagtgcttgatagtgtcgtgaatgatactcagtatagatgtgatgatgaagattattttggatggattaagtcattaaagagaatcgatttgacttcacttcaatcaaagactatcaaagcaattgatgttattataagtgataagtcagaattaaaggaattgtgggaagaaaatgaagaactttattcatcgtggagagaggataaacgttctatacaaaaaagactaatacaataatttataggtatgaaaagtggatagttatggaattgaatatttttgtgtattatctaaataatttagacttgtgacttcaaataaaatcatctgcattttcaataaaagagataatttatcaatattgtatgatgattattgaatttgaaaacaatgctaggagatttttataaaagaatcgtgattcaaataggttcaacactcaatgtaatatttctacgtgaaaaatgtattgactatattgatattgttgtggcacaggtgagaaggatacgtcatcttgagttggaggtccattattgatgaagatagaagtactgaataaagttgacatacttcaatgagaaacaacaattttagaaaattcatatatacgacttcagtataaagttttctcttagatgaaagaagggtcatgttgtgataacatcagatgtagttaaacaaataggagaaaagctatctttagaaaacagtggtttaaaagattaatatttagctgaagatataataaatatcatatattatagatgaagataatcaaaaacgaaatggtgaattgccatttcgttttataaatactgaaaattcttttgtctgaattcttttggtgtttggtttgtgacttgtttaaatctttgagtaaagtgactttgacttgtaaagtttaataatgtactgatttcttgaaaagaatgatcagtaaagagaagaagatgtttagcttcttcgatttttctttctaataaatattgagtaaaagaaattcctaattcctttttaaaacgcgatgaaatatagacagaactatgattggttaaatcttctaagtcttgtaaggttactttttcatagagatgggtatcaatataacttacgcattgattgattaaagtagaacattttttagcattagattgaatcagtttgatatattcataactagcatacttgatgtattgaatacattcttgaacattacgaatatgaggaagattttgaatcagtgcatcagagagaccaaaggcgctttctaaaggaacaccttcattgataaccatacgtgtcatgagggtcacaatagaaatgaatttaatcttaactgtatctaaagaactttctgctaaagaaacaatataagttttattaaattgagtaaaaatccaatcaatcttatctttacgacctcttttcacataatccaaaaaacgcagttcaaattgataagagtcacgtgttgtatcttctatacgacgatcatatacattcttttcaaagatttcctgtgaactcatggcttgtggattgattcttaaatattcaatgggaatttgtttatcatcaatatcctgatgagttaaaaaagtatataacatactaatggctttaatgaaattatctaatgattcagtagaaatataagtttgaaattgactaaaataatcaggtttttcttgtgatgcaccaagtaataaacaaggaccaatgagaataataaagtcctcataagaaaatgatgctagtaaggattgataggtattgatgacatgaacaggatatttatcttgtttgagtagataagggaaatcttggatatgaagatataatggagagtatgaaggaaagaggagttgatgtgacttatcaatgatacaaatagggatataaatacgttgataaaaggtatcaaagagttttgtcaatatttctagtttcatagtcattctccttaaaattattataaaaatattaaaaatatgatatatatacaactaggactattatataatagccttgcaacaaagtaaagcgtttacagatatggccatatctctttcactttgatagcaggatatatgtagaaaggattgaactttatgcaaaagttagaacaattaattaatgcgaaaataatgccattagctgaaaagatgactaagaataaaatcttaggggcattaatggaaggttttattagaacaagtccaattacacttggaattgcttttattacaatcgttggaaacttcccaatacctgggtggacaaattatttaaaagaaattggtttaatggctcatgttgatgcgattaccaatggagcaacaggagtcttaactctttatgtcatttattctcttgctatggcttatgccaaacgtttagaaacaaatgaaaagaatgctgccattatttctcttgctttctttattatgattattccacaaaccattacgacaacagtgatgcaagatggaaaagcagtagaaagtgttattaatgctttaaaacttgattatttaggtggtcaaggtttatttattggaatgattgtggctttggttgtcacaaaattatatgcttatttatctagtaagaatttaacatttaaattacctgatagtgttcctccaatggtttcacaatcattatcaccagtttttgttgtgacaattatctttgtcttagcatttgtgatcagagtcggatttagtttcactccagctggagatattattaatttctttattcaaacaattaatgctccattaaattcaatggttgctagtccaatttcaattattatcattatgggattgcttgctattttatggttctttggtattcataatgctgttttacaaggacctttaggagtcattagtttaactatggtgatgggaaatattcaagctttccaagctggaaaagaacttccttatttattaccttcagtcatttatggagggatgatggcttctggatttatgagtattgtgattggttatatgtttaaagctaaatcagcaaaatttaagcaacttgcaaaattatcatttatcccatctgttttcaatattacagaaccaattatgtttgggatgccaattattatgaacccaatgtttatgattccacaatgttttactcaaattattagtggttttgtgacttggggattagctattacaattttacctgtgagcttaaatccaacgatgtcattattaccttggacaaccccaatctttataaaaatgcctttagccgggggaattaactatacaattattatgattatttgttttgcgattacttttatgatgtggtatccatttatcaaagttgcagatcgtcatgaatatgaattagaacaagccaacgaagaaagtttacaaaatgccaaataatcaatggacaacttattggagtcgtgctcaaagaggacttggcttgattccaacaccttgtttaaaacatcaacatatgactttgaaggcgattcctcaaagtcatatgttaagattaagatttgcagccttttatgaaacacaacccatcgaaattaccaatgtttatctttctgattctcataatcactatcgccttttctttcaaggacaagaaaaagtcacactcaaaccgcaagatgcatgctggagtgatgggatagatattcatgagatgaatcaatcagcattaacccttgattatgatatcgttgtatcgccagattatcactttgtttctggttttgaaagaatggattatgatgtttttaaagaagcccctcaacaaatttatgctttaaatagtattgaattacaaggatcattaaaaggatgtctatgtgtttttggtgattcaattgttgaacaagggaactatactcgtattcttcaagaaaaagcaatggagaaaggttatagtttgattaatctaggattaagtggtaatcgtctgttacgtcaaattgagtgtgttgatttacaagatactgataatccagaaatcacacaggttttgacacaaaaagtgtatcaaaatatttccattgataagcaatgttttggaatatctgggttatcacgttttatcaaagaagcaaaagaatgtcatcaagtttatcagtatatcattgcgataggagttaatgatttgtatcaaccaggaacattctgtgctttaatgagtgaattaccaacccttgaagatatgcaaaaaggatatatgtctttaagcgaaatgattcaagatataccaactttatggtgtgaaattactccatttatcaataatccgcattgtacaaaagaaaaagaagaaagacgtcaacaaatcaacttgtggttaaatcaaacaatgaaccaaacagtatgttttgataatttaaccaaagaagatatgaacgaagatggtttacatcctaatttacttggtggaaagaaaatggctaaggagatagaaaaatgtttaaatatataatactcattgttatcatcattattttatatattgttttttggacaccttatccatttgtttggttattgcgttcaaaaaaagaagtagaaagagaaaaaggtcctaacaatattgagaaaatcaaagaaggaattcatattttgcctaacctcccatatccttcaaaatatcctcaagcgacttatgacctatatcttccaaaaaatcaacccatcaaacatatgattgtctgggttcatgggggctcttttatctcaggtgatagccggggaatgcgaaattttgccccgatgcttgcaagtcaaggttatggtgtttgtgccatgaattatgcctatgccccaagatgccattttccaagtcaagtcaaacaagtcgatgaaatgttatgtcacattcaaaatgatttaaaaaaagacaatatcatgattgaagattttatcttaggtggagattcagcaggagctaatattgctgcaacttatgcatcaatgtatcaaaatgagacattggcattaaaagcaaatgtcaatttacttaattctttaccaattaaagggttattattgttttgtggtccttatgatttatcagaagattttcaaaaagaagaatttaaacaatttcgtttgtttatgaaatatattggttggtcttatttaggacataaaaattggtggaaaagagatgaacgtttttattcatcaccattgcataatattcataagcgctttccaccagcttatatttgtgatggtaagaaattttcatttatgtggcaaggtcaaaagcttgttcaagctttgaaaaagcaagaaatttatgtagaaagtcgtttttatgaacacatgtctcatgaatttcaatttgattatcagaagaatgaacaagaagccatgcaggtttatgaagatacacttcattttttaaaacatattttagaaaaggagagcacatgttaaaaaaagattttttatggggtggagcagttgcggcaaatcaatgtgaaggtgcctatgatgaagatggtaaaggtctttcgattatggatatcatcactgctggtagtcaagatgctcctcgtcaagtgacattagaaataaaggatgattgttattatcctaatcatgaagcgattgatttttatcatcgttatcaagaggatattgaattatttgcccaaatgggttttaaatgttttcgtacttcgattgcctggacaagaattttcccccatggggatgaagatgaacctaatgaatctggattagctttttatgatcgtttatttaaagctttaaaagctaaaggaattgaaccagttgtcacaatatcacattatgaaatgcctcttgatttggtaaaaaaatatggtggttggacaaatcgtcgattgatagatttttatacgaaatatgcatctgttttatttcgtagatataaaggtgttgttcgttattggatgactttcaatgaaattaacagtacggttaagattcctatgattgcaggtgttttaataaaaccgggtgaaaatcaaaagcagattgcttatcaagctttacatcatcagtttgtcgctagcagtaaagcagttcaattagcacatgaaattgatccagataataaagtgggttgtatggttatgacaacggtgggttatccacaaaccagtcatcctttagatgcccttgctgctcaagaatatttaagagatggtacattgtttttttgtgatgtgcaatgtcggggatattatccaggatattttcaaaattatcatattgaattggatattactgatgatgatttgaaggatttaaaagctgggacagttgattatattggtttttcttattattcttcacaagttgtttcgcatcttgatggtggagaaaaagtgaaagggaatatagtggatggtttgaagaatccttatttacaagcgagtgaatggggatggcagattgatccagatggtttgaaatatttaatgcgcatactttatgaacgttatcaattgcctttatttattgttgaaaatggtttagggtatgatgatcaaatcaatgaaaatggtgaaatcattgatgattatcgtattgattatatgcgtgcacatatccaagctatgaaggatattgttgaacaagaaggtattgatttgatcggttatacagcttggggaccaatagatattgttagtgctggtactggtgaaatgaagaaacgttatggaatgatctatgtggataaagataatgagggacatggatcattaaagcgaatgaaaaagaaatcatttgattggtatcgacaagtgattttaagtaatggagaaatattatgatgaaatatttaagtatagatgctgggggaacttttattaagtatgcctggatggatgaagatggacacatcttgcaacaagggaaaaagccaacaccttatacatcaaaagaagattttatgaagataattcgtgaaatctggcaacaatgtgatgataaaaaaggtggaatcgcaatgagtctaccaggaacaattgatacatcaaaaggttatattttccaaggaggttctttgacttatcatcatggattggctttaaaagagtggtatgaagaagtttttcaagttcctgtggagattgaaaatgatgccagatgtgcagcaatagcagaaatgacggctggtcatatgcaaggtattaataatggaattgtcttaacttttggcacaggcgttggtggatgttttattataaatggtgagatttataaaggaacacatcttttctctggagaagtttctatgttgatttgtgatgatataaaagccaaaggaatggatgctgtgttaggacatattggtgggattggtcattttgtaaaaagagtttgtgaagcaaaaaaggttgatattacagatggaaaaacagtttttgattggattgcttcaggtgatgagatagctttaaaaatctttcaaaaatattgttatgatattgcgattcaactctttaatatgcaaattatgttagatcctatgcgtgtttgtattggtggtggtgtgagtgaaaatccaattttcattcagggtattcaaacggctatgaaggttttttatgaatcattaccagtggctatgccacgattagaaattgttgcttgccagtatcataatgatgcaaatttaaaaggcgctttctatcattttcaaaaacaacaaactttagcaagaaaataaaaatttcttgctttttttgacaaaaaaatataaagtattttgtgcatagttctttgtaaaaaaatggaaaatcaggagggaaagcttgtgcgcctagaagaattgattagtaagaactataaccaattaaatgaaaatgatctttatatttggcaatatatttcagcccatcgtaaagaatgtgaaaagttatcaattgatgaattggcatcacgttgtcatgtttcaagaacaactgttttacgtttttctaaacgtttagggttaaaaggatatgcagaattaaaagtttatttgcgtattgataatcaaaactatcaatataaacaaacaggtgtagaattggtttatgaaagatatcaagcatatatcaaagatataaaaaaacgcgatatgacgcgtgtgattgaaatgatagcaaatgctaaaaatacttatgcttatggaactggcagtattcaaaataatgtagctgctgaattaaaacgttcttttttgattgttaataaaatgttttttaccattcaatcaacgaatgaaacaaatgcttttgaagaaattattactgatcaagatttaattgttattatttcttattcaggagaaaatgaacaagccgttcaatttgctaaaaaattaaagatgaagggtgttcctattattagtatcactgcaacccaaaacaatactttatcacatcttgcagatgaagctttatatgtggatgttcctaatattgttaatcctttaggaccacgttatgaaggattggtgaattattttatcttaattgattttattcttgtaaaatatatggattattatgaaaggaagatgaatagtgacattagatgagttagtagaatctcgttatgatgagttaaatgaaaatgatttatatatctggcaatatatttttcatcataaaacagaatgtcaaaaaatgtccattcaacaattggctcatgcctgcaatgtttctcatacaagtattatccgttttacaaaaaagattgggttagatggttatagtgaattaaaagtttatttaaaatggagcttaaataaacaatttgactttgatagttacagtatgcgtcattcttcagatgaattgaaaagaactttagatgttatggaaaatagagatttagatcatatttttcacaatattgatactgctggaagaatcttcttgtttggaacaggtgaagttcaaaatcatgcagccttggaatttaaaagggaatttgcttatcgtcataagattatgcatgttattgaggggaatacagaattagatacagttttgaataatattttacctgatgatttctttattcttatttcgctttcaggagataatgagcgtgttgtgactttagcaaaatacttacataagatgaatattcaaacattaggaattgcgagacataaacgtaatttgttatcacaatatgttgatgattatattggttttgaaacaagtgattttcatactggttttcaagataagagttattgttgtaccggacattttttcttgattgttaatatgttgtttttaagatatttagaatattgctcattaaaggaaagtaatggtagtttcagttaaaataatttgatataataatggtgtttggaggtaagataaaatgaaaacagttgtaaaaacagataaagctcctggagctattggaccttatagtcaaggaatcgatttagggaatatgattttcttttctggtcaaattccattgaatccacaaacaggagaaatgccagaaggcattgaagcacaagcaaaacaagctttagaaaatgtaaaaggtttattagaaagtcaagggttagatttttctcatgttgtgaaaacaacagtattcttagataacatggatgattttaatactgttaatggaatttatgcacagtattttgtagaaccttatccagcaagaagtgctgtagaagttgcaaaacttcctaaaggagcattgattgaggtagaggttattgcggttaaatcataacaaagttcttttagcagaaaggtttcactgttatataagggtttattatgcggatggtcattatgaacttcgagatgaaaatattcaggattatattaagcaaaatagagggaaaagtggatataaacatcctattttaatagaaaatcaaaatttgtatccaacaattgatcaaaaggaaaatctttgttgttggattaatcttggatatattgaagaaaaaaatccattttatatatgggttttacaatcacgaggtttatatgacaaagcagttaaaatgtatgttaattttaaattaaaggaattagtaaaagatagctgttgaggctatcttttaaagtacgatcaaggcaaataatcccattgcaaggcaatagaaagaaaaataattcattttacgtttatttaaaatattaaataataattgtaaagctaaataagtaacaactccactaatgataaaagcaataaaataaggtaaccataaagtagaaagtgtaggactagaaataaagtcttttaattttaagacaatagcacccaaactgacaggcataaacataaagaaagaaaaatcacgggcagttttttgttctaatccgcctaacattccaccagtgattgttgaaccactacgggaaataccaggtaataaagcaaccagttgaaaacatcccatacgtaaagcatcccataaatttaattttcttttcgtacgctttcctttatatccatatttatgaattaacattaaaaagacagctgttattaaaagcgtacaaccgactaatttaacattagaaaaagctgtttcaatataatcattaaataaaactccaccaattgctgctggaatagtcgcaacaatcaacaacatgcaataacgaaaatcaggtaatttctcatcccttgaatcagctttaaagatataacaaaaaaaagaaacaaagagacgggcaatatctttacgataataaaacataatcgcaagcagtgaaccagtattcactaaaacttcaaaagtaatatcagtcgttggaaacttccaacctaaatgttcaaatatagttttgaaaataacaagatgaccactactagaaataggtataggttcactaaatccttgaatagctccaagtattccataaacaagtatattttgtaataattccatatgatttccccttattctttagatatatctttattataacgaaaataaagagaaaaatatagaaagaattatatttaatcatttttgaggaatactaaacatatgatgaggtatagggggtaacatatgtttttagttaattttgtttatgatgatgaagaattattagaaccctatgaatggcaggatgatgattgttttgaagaattttattatctgccaatttattatgtgtcattagaacaattacatgattttatttatgctcaattatgtattgatgatttagaggattctattttcattgtctgtgatggccattatagtgttgttattgaaatgagagatggacatatttatcgtagaggaactgtgaatttattacaaagagatgtgattaatgatattacaaagactttaggaatgacttattttgaatatagaatcatagaagaagcttatgaaaaagagtttggcttaacccgtgatgaaagattaaagaagatttgtttagaagaagtcattgatgaaatttttgttgttcattatgaattgtttttagaaatatgtgaacagttaaatattaaggaagaaggaccaagtgaaaaatatcttgctttaaaacataagattgaaaagggatattcttctttacatgaattgttatatcaagaattggtacaaaaagggtaatgaaaaagcatggaaatccatgcttcattcactatctttttttaattgtaataccaatttttctttcaactttagaaagtttctttctagcgattggtcttgctttagcagcaccagcttctaagacatcatctaaataacttccggttgtaatttctttataacgcgcttgaatcttttccaattcatttccaacaacttcagctaaatcagttttaaattcaccataacctttaccatcatattgtttttcaatatcttcaatagaacgattagataaaatagaatagatttctaataagttagaaataccaggtttattttctggatcataatgaatatgaccatcactatcagttactgctgatttgatttttttcttagaaacattaatatcatctaaaatataaattgttcctttgccattttcatctgacttagacatcttctttgttggattttgtaaatccatgattcttcctcccaccttagcaatcaatggttcaggaattttaaaagtctcactataacgtgaattaaatctttcggcaacatcacggcataattcaacatgttgcttttgatcttcaccaacgggaacataatcaggatcatacattaaaatatcagcattcattaatgaaggataattgaagattccagcaccaatgacttcatttttagaagctttatctttatattgagtcatacgagaaagttcacccattgaaaccatacatcctaaataccatccaagttgagcatgttctaagacatcagattgtaaaaataaagtcactttttctggatctaatcctgcagcaatatacaaagcaattaaatctcttgtattttgtcttaattctttaggttcttgataaattgtcattgagtgaagattggcaataaatataaacatttcatactcatcttggtaagaaacaaatggcttaatagcaccaatatagtttcctaaagtgactctccctgttggtttaattccacttaacattcttttcatatactttcctccttgaaataaaaaaacgtccttataaaaggacgtaaatatacgcggtaccacctttgttcatatctaatgatatgcactcttatcttaacgcgattaacgattgataactgttgctaccaataactccagaatcccaatttcatctataaccatgacttgtttccatcacccacaagctttctattacaaagattataaactacttcattccttcttcgtcataatgacattataagattgttagaatgaaaaatcaatagataataaaaaaagaatttcataaataataaaaatgttgtataatgagatagataaggagatgatgttatgataagaatttatacagcaccaagttgtgcgtcatgtcgaaaggtaaaagcatggttgaaggagcatcagattccttatgttgaaaaaaatattttttcaacattattgagagaagcagaattaagagagttgcttgaacgaagtgaaaatggaactgatgatattatttctaaacgttcaaaaattattaaagaaaataaagttgatattgatgagatgtcagtgaatgaattgattcattttattcaagaaaacccttctattttaaaaagaccaattattattgatgaaagacgttttcaagtgggatataatgctgaagaaattagagcttttattcctcgtgaattaagaaggcttcaagaatgtgataacagtgacttctgtccacaatttactgatattaaaaaagaatactataaagataaaacaaaagaatgtccagaaggatgtgaatagcagattaagtgaaggcttaatctgtttttaattgactgaatatttttataaattgataaataaagtgacttaaaaaatgggttaatatcatgtagaatttgcgatggtgtcttgatgaaaaagaaaacagatgaatcttcgtctgttttctttttctatttcatagtataataatagtagcatgaaaggagaatttgagtatgtggggtattattgcaacttggcgtatggctgtagaaggaattagtgaagccagtcatatcttagaaaataatggggatgcaggtgatgcaattgaaacggctattcaggcagttgaagattttgaatattataaatcagtaggttatgggggacttcctaatgaagaaatggaagttgaattagatgccgcttatatggatggtgatacattagatattggagcagttgcagcgattaaagattttgcgaatccagtatcaattgcacgtcgtttatcacgtgagcgtgtgaattgtatgttggtaggtgaaggagctgaaaagttcgcccataaagaaggttttgaaagaaaaaatatgctgacaagtcgagcaaagattcattataaaaatcgtctcaaagaagttcaacaacaagatattaaaccttattctgggcatgatacagttggtatggtttgtttagataccaaaggaaaaatgacttcggcaacatctacaagtggtttgtttatgaagaaaaaaggtcgtgttggtgattcaccgatttgtggttcaggtttttatgtggattctcaagttggaggagcaagtgcaacaggacttggtgaggatttaatgaagggttgtatttcttatgagattgtaagacttatgaaagaaggaatgcatccacaagaggcatgtgaaaaagccgtgaatgaattggataagaaattaaaagcaagacgaggaaaagctggagatctttcattgattgcgatgaataataaaggagaatggggtgttgcgacgaatattgaaggattttcttttgctgtagcaacagcgagtcaaccaccaattgtctatttgacaaaagttgttgatggacattgtattcatgaagtggctagccaagaatggttagatcaatatatgaaaacaagaatggccccattagaagaaaaataagatggaagaagatattattttacaggtagaagccttatcatcacaaatgattgatgatattaaaaagattgttcgttgtcctagtgttgaaggtgaagcattaccaatggcaccatttggaaaagatattgctatgacattggatgaaaccttaaagattgctgaaaaattagggtttgaaacacataatctagattattatataggttgggcacaatatggtgaaggtgatgattatattgggattattggtcatcttgatgttgtggaagtaggtgaaggatggaaacatccaccctttagtggttatgaggaagatggcgtgatttattcaagagggattcttgataataaaggtccaatcatggcttgtttatatgccttgtatgcgattaaatcattacatattcaattaaaaagaccagtacgtattctttttggttgtgatgaagaaagtggttttgttgatttaaaatattatttaaagcatgtttctccaccgattatgggatggacaccggattgtaagtatcctgttgtttatggagaaagaggacgagctgtaattgaaatttcaactgatgaaaagaatgtggatgaattttttagttttgtgaatacttattttatgaatgctaaaatgaatggtgaaactttaggtgtcgatttttatgataaagaatttggcatgaatgaaatgcgacaatataaattgaaacatcaacatcagtctatcattttttcagtcacattttcttatccagcaagtatgaaacttgatgatttaatagaaaaaattcaagacaaagcaggtcatttcaaggttgaatgtgttagtcattttgaaccagtacgctttgatccaaattgtccaatggttaaagctttacaaaaagcctatgaaacaataactcatcaagatgggacacccgtgacaacgacgggtggaacgtatgcgaaattgatgcctcatattgttccttttggtcctagttttccaggacaaaaaggaattggacatcagcctaatgaatggatgaaggttgatgatttaattaaaaatgcaaaaatatatgcattaggaatctattatctggcaaacttataaggaggatattatggaaagaatcgtagaaatatgttgtggtagttatgaagatgctttaaatgcctatcgtggtggagcatcacgtatagaattaaatagtgcacttcatttaggtggactgacaccaagtcttgcttctttagttttaacaaagaagcatactgatttaaaagttattacaatgattcgtcctcgtggtgctggtttttgttatagtgaggatgaatttgaagtcatgaaagctgatactttattgatgatggaacatggagctgatggtgttgcttttggatgtttaaaagaagatggaagtattaatgttaaacaaagtcagcaaatcattgatattgtaaaagaatatggtggagaagtggtttttcatcgtgcctttgattgtgtaaaagatccttatcaagcaattgaaaaattaattgagatgggggttgatcgtgttttaacaagtggtttacaatcaaaagcaatggatggtattgaattgattcaaaaattacaagaaaaatatggtcatcaaattgaaatattagctggaagtggaattaatgcagataatgcaaaagtaatgatggaccaaactggaatttatcaagttcatagttcatgtaaaagttggatttgtgatccaacaacagctatgaatcaagtttcttttgcttatggggctgaaccccatcaaatggattatgatgttgttgatatgaaattagtggagaagatagttgaagaaatatgttaagaaatttaaggaaaaataaaaaagtcagattattgattactttgatatgtgttgtttttgccgcgtttatgcaagcttatgtgattaaagtctttattcaaccagctgatttattatcaagtggatttactggtgtagcgattttgattgaaaaaattacttcaagattttttggtttttcgttttctacatcattaggtatgatattactcaatgtcccagttgctatactatgttataaaagcatcagtcctcgatttactttcttttcacttttagaagtctttttagccagtttctttttaaaggtcattaactttccacctatctttgatgatattttattgaatattgcttttggtggttttgcttatggtttattaactgtcatcgcattacgtgggaatgcttctacgggtggtacggattttattgctttatatgtttctaatcaaaaaggaaagtctatttgggaatatgtttttgtctttaatacagttatattggttatctttggatatatgtttggctgggaacatgctggatattcaattctattccaattcatttctactcgaacaatcgattccttctatcatcgttatgaacgggtgactttacaagtgacaacaatgcatgcaaaagaagtgatagatgcttatgtaactcattatcgtcatggaatttcatgtgttgatgcggtaggtggatatagtaaaaaatcaatgaatttattacatacggttgtttctagttatgaagttcaggatattgttgatttaatgcgtgaagttgatccaaatattattgtgaatgttgtaaaaacagaaaacttctttgggggattttatcaatcaccaattgactaaaaaaagagttctagagggaatctaggactcttttgattttactaggacaattatgtgtatagtttaattgataaggcttaatgatttctaaaaattttttatagcctgctttttcattgttgacttcaaattctagttcataatctttttgattgaaataagtattttcatctaatgataatgttccttctggaagaataatatcatagcgatgagttgttaatgagaattgttgctttaattcagttaaagcaataccttcatcttcaagaatctgagtaatttcatttttgagttgatgatgagtaaaagcatctttttcttctttagttaattgaatgtttgtttctaaacgatgattattgataggtctttttaatgttaattcatattgattgtttttagtacggactcttaacatatattttttttgttgtaaaagagggtgggtatagtattcattaatttgaatatagtcatgaagaatttgattttgataatcgtttaatatttgtgtaaagatatcttttgtaagtaagattttatattctatttctatttgttgcatatttatcaccgtttttattttaacttgtttatgataagaatgcaaatgaaagagattgtgaaaaagaagtgaatactatataatagaaaaaggcggtgagagaatgaaaacatatgcaattgtaagtaagcaagatgaaaagtcgatagaattatctaataagatgagaatagaactagatacttttatgacatatgatgaagcccatccagaattagtgattagtgtaggtggggatggaacgatgatttatagtgttcataaatatattcatcaattagatgaagtttcttttattgggattcatagtggaactttgggatttttaacggattatcaaaaagatgaatatttagaattgattgaggatattcgtcaaggtgagtatcatatttataatcgttgtttattatcagtgaaaatgggtgatgtgagttatatggcactcaatgaagtaagattagaaaataatcgtcgttcacaagttttaggcgtttatattaatggagattttttagaaacatttagagggaatggtttgtgtgtatcaacggcttctggttctacggcttataataagtcattgggtggagcggtaattaattcaggggcaggattgatgcaattgactgagattgctggtattcatcataatgcttatcgttcattgggctcaccattgattttagattggacacatacaattcatttagaatcacaggattttgatggagctattttaggtattgataatttggtttttgatttagagggagaaggttcgattgatatttcgttggctcaacaaaaagcaagatttgttcaatataaaagagtagcttatattgaaagattaaaaagggcttatttaagtgaatgaaaagacagtggattgtagataagctaagtcgtattgatgattttgcttatcaaaagggtattaataagaaaatgttgaaggccattaagatgaaaggggatattttggttgatgggattcatcaaagtgtaagatatcttttaaagccaggagaggttattacttttgtttatcctatagaagaaaatcatatgctgccttatgaatatcctttaaagattgtatatgaagatgaatatttactagttattgataaagaaaaaggaatgccctgcattcctactcgtgcgcatccttatcatacccttgctaatgcattaaccgcgtattatcaaaaagttaatttgttttcaacgattcatttagtgaatcgtttggataaagaaaccgctggtttattgattgtagctaagtatcgtgagattcatgatttgatgatgaaggatttaaagcatatttatcgtgaatatcaagctcatgttgaagggaaggttgaacaaggggttgttgatttaccgatttatcgtgaaaataaagatatgaaaagaatcatcgatgaaagaggaaaaccatcacgtactcactatcaatgtttacattatcaaaaaggaatttctttagttcgttttgttttggaaacgggaagaactcatcagattagagtacatatgtcagctttaggacatcctttaataggtgatgaaatttatggaaatcagcaaggtacttttgacttgacgagtgtgatggtggcttttattcatccggtaacaaaaagaataataaccataagaaagaggaatgaattttaaaattcattcctcttttaaagcattgaacgatttttaatgatattgttttgactgttcatatcaatgaacataccaattgctatcatatatgagaatagtgaagaaccaccatatgaaatcagtggaagggtaatacccgtaattggaagtaaccctaaaatcattcccatattccaaatctgttgaaacaataacataccaataattcccattgtcatatacttatcacggtcattcgtagattcaaaaccagttttcaaaataataatatcaaaagcaacaatagctaaaattgttacaaatccaccaagataaccataatcagttaaaattacagcaaaaataaaatcagtttgtgcctctggaaagactttaaccacagcttggaaaccatgtccaaaccaaccagctgttccataagataacaatgaattaaataattgataaccttctttaccaaaggttccctccggatcaacccaaccataaaaacgatctaatttatgtccactaataattttagcaaaaatatcaggctgataaataaacaaataagtaccaacagcaataataataccaactaggatgaatccaacagtaaaccattgtccccttaacccactagaaaataaaacaaaaacaacaccaattaatataattaaaacaactccagtatcattttgtaaataaaccagtaaagctgggggtaatacaactgccatacattttaaaatatatcttatttctgtttcaaaattacggaccaaataataatcattatattcttttgttatttttgctaaagcaataacgatcgcaattttcatgaattcagaaggctggagactaaaaccaggaaaattgaaccaggaagttgctccaccggatgtatgggtaaatggaataatatgatgattaggccaaatacgtgtatagataaagtgttcaatcgcaagaatgacaagcagtgcaagtaatattccatatatcagccatatcttatcatagatttgctcatttccaattttatatataataaagattaaaaccgctgaggcaatataaaaaacaccttgctttatccaaagcgtagcaggatctcctaccttatttgaaatcaaaggagcggcattcaatatcgcaaagcaactaatgattgctaatagacaaacaataaaaattaaaggttgttgtttgattaaattttttattttttccacatcgttgctcctttctttttttatcttcttatagtatactataaaaaagaaatacttcaatcaaaaaaggatgtgaatatatggattttcaatatgttttaattattataggaattattttagcagtcttacttctttattttgggtttacaagattcattaaaaataaagatttaagtcaagaagtggtttctacaattaatattgatgagcttttaaaagcattaggtgggaaagacaatattttagatgttgcaagttctccatcaaagttaactgtgacattaaagtctcatgatggaattgatattgataagattaaggaattaggagctagtggaattgttgaaggaaaagaaaatctttcaatgatttttggaaaacaatcttcattgatagctcaagatttaaagaataatttgtaagcagaatgaatttctgctttttctattttatggaatggatttaagttatgatgaaagagaagaaagacaaatttaatgattaaaatgataaaaaataattcttttattgagagtgcaaatcggtggacgaaaggaaagatatttggtatagtgtaattgtcatcgagatgatagtcattataggataaaaaaagctcataagccttgaaaaaacatcaaaaaaagtgatttttttcattgtgcataggtagcaagagtgctataatgggtgaggaatttaattcaaggaggaaacaagaaacatgttagaaaaagaacaatggaaaggtttcaaaggtagactttggaaagaagaagttaacactcgtgactttattcaacaaaactataaaccttacgatggagatgaatctttcttagctggacctacagaagcaactaataaattatggggaaaattacaagaactacaaaaagcagaacgtgctaaaggtggagttcttgatatggaaactgaaattgtttctggattaactgcatatggaccaggatatattgatgaatctttaaaagatttagaaaaagttgttggtttacaaactgacaaaccattaaaaagagcattcatgccatatggtggtattaaaatggctgaacaagcttgccaaacttatggatatgaaccaagtgaaaaattacatgaaatcttcactaaatatcacaaaacacataaccaaggtgtatttgatgtttatactccagaaatcaaaaaagctcgtcacaacaaagtaattactggtttaccagatacttatggacgtggacgtatcgttggagattatcgtcgtgttgcattatatggtattgatttcttaattcaagaaaaattagatgatttcgctcattgtggaagtggatcaatgactgaagatatcatccgtagacgtgaagaattagctgaacaagtaaaagctttaaaagaaatgaaagaaatggctgctatttatggttatgacatttctgaaccagctaaagatgctcgtgaagcattccaatggttatattttggatatttagctgcaattaaaacacaaaatggtgctgctatgtcagtaggacgtgtttctacattcttagatatttatatcgaaagagatttagaagctggaatcttaactgaagaagaagctcaagaattagttgaccatttcgttatgaaatgtagaatggttaaatttgcacgtattccttcatacaaccaattattctctggtgacccagtatgggcaacacttgaagtagctggtcttggtactgatggacgttcaatggttactaagaactgtttccgtttcttacacacattagaaaatatgggacctgctccagaaccaaacttaactgtattatatactgaagcattacctgaaaacttcaaaaaatatactgcaaaaatctcaatcaatacaagctcagttcaatatgaaaatgatgatgttatgagacctgtatggggagatgactattcaatttgctgttgtgtatctgcaactcaaactggtaaagaaatgcaattcttcggtgctcgtgctaacttagctaaatgtttaacttacgctattaacggtggtatcgatgaaaaaactaaagaacaagttgctccaaaatatcgtccaattacagatgaatatttagattatgatgttgtaatggaaagatatgatcaaatgatggaatggttagcagacttatatgttaatacattaaacttaatccaatacatgcatgataaatattattatgaagcagctgaaatggctttaattgatactgatgtaagacgtacatttgcaactggtattgctggtttctctcatgttgttgactcattaagtgcaattaaatatgctaaagttaaaactattagagatgaaaatggtatcgttgttgattatgaaactgaaggagatttccctcgttatggtaacgatgatgaccgtgctgatgaaatcgcagtttggttattaggtgaattcttagctaagattaagaaacatcatacttatagaaattctgaacctacaacttctatcttaacaattacttctaacgttgtttatggtaaagctactggttcattacctgatggacgtaaagcaggtgaaccattatcaccaggtgctaacccatcttatggtgcagaacaaaatggtttattagcttcattaaactctgttgctaaattaccatatgaatgggcattagatggtatttctaatactcaaactatcaatcctgatgctttaggacatgatgaagatgaaagaattaataacttagttcaagtattagatggatattttgaacaaggtgctcatcacttaaacgtaaacgtatttggtagagaaaaattaattgatgctatggaacatccagaaaaagaagaatatgcaaacttcacaatccgtgtatctggatatgcagttaaattcattgacttaactagagaacaacaattagatgttatcgctagaacttgtcatgatcatatgtaatcaatagaactttataaaaaagaaacggcctctttccaagaggctgtttttataagaggaggaagaaagtggaaaacgttattggtagaattcattctattgaaagctttggttcagttgatggacctggagtaagatatatttattttttacatggttgtcctttaagatgtcaattctgtcataatcctgatacttggggttcaaagacatatcaagaaatgactgcacaacaagctcttgaccaagcgatgaagtatcgtaattattgggggaaaaagggtggattgacaataagtggtggagaaccattattacagattgactttttattagaattatttaaacttgcaaaaaaagaagggattcatacttgtatagatacaagtggtggatgttttacaagagaagaacctttcttttctaagtttgaagaattaatgcaatatactgatttattattggttgatattaaagaaatcaataaagaaagacatattcaattaacaagtaaagataatgataatattttggatatggctagatatttatctgatattaataaaccagtatggattagacatgttttggttcctgaaagaagtgattttgatgaagatttaaaagaattagatcaattcattaaaacattaaagaatgtagaaagagtagaagtattgccttatcatacacttgggatttttaaatggcaagaattaaagattccatatcaattagaaggtattaatccacctacgaaagaacgtattgaaaatgctaatcaactattacatacacaagattatcaagaatttaaaaaataacatgagcttcaaatgaagttcatgttttttgtttaaatactatgaacaagttgttggaaataaatttgaataggatgttcacaaagttttaccataaaatctatagcgtcattcatagaaatttcatcataatgatttaaccaaacttctaaataacctatccatgcatcagcaatatatgtttgattaagtttaatcttgatattatctaagttacaatgatagtccttcatccatatatcaataggatgattcataaatacattatagagaacagttttcattttatcttttgaacattttaataaaatttgtattaaataacgattttcattcacttcatgaaaacaccaagttacagcttgtttggcatcattatgcataatatcaatcataattttatcttgatagctttccatcatttctttttctaattgtgaaatgatatcatttaaaagggcatatttatcctcgtaatgagcatagaaagtatttcgactaatcatggctttatgacatatatcactaatacgagttttttcaaatcctaagtcatcaacacattctaaaaatgaattgataatgtttttttcagtttttagatatcttaaatcatttttattcataataacacctccaattttattatacactttgttagataactaaataaatataaataagtgtcaattgaaataatctttgtcattatgtatcattggatgtagaaagtgaggtatttcatatgcgtggaggtcaatataatggtattaaaaatgtagaattatcagaatttgataagccaatcttaaaacaagactctattcttatcaaaaatatgagagcggggatttgtggaacggatttacatgcttatactcttgaaggagaaagtgtgggaattttaccaggaaatcagtttggacatgaaatgtgtggagttattgatagtattggtagtggtgttgatggttttgaagttggacaaagagtatttgttaatccagttacttttagaagtataccagaagggtatacgccaactatgagtgctgatatggcaggagcattttcagaatatgttttagtggaaaaaccacagtggaatgttaatttatttaaaattcctgatcatgtgagtttggattttgcagtattagtagagccacttagtgtttctatgaatggagttatgttagctcaacctcaaaaagggcaaaaagcaatcatatatggagcgggaactattggacttggatgtttagtggctttaaaacatttaggtattgaggatgttattgtggctgatagtgttcctttaagattggaaacagtcaaaaaattaggtggtattccttgtgatattacaaaaactaaaacaaatcagtttgccttggatttatggggtaatttaactgctggtatgggaatggatatgaatgatgctgatcttgtatttgattgtgctggatatactggttcaattcgagattatttagataatgccaaaatgggttctcaacttatttgtattgctttaggtaatggacaagttcctatttctacttctgaattagcatttaaatctgtaagtataaaaggatcttgtggatatacatcacaagcaaatcaagaagttattcgtatgcttgatagtggaatagatttatctccaataattactgcaacttatccattatcaaaaatatctgaagcatttgaagatgctactaatgttaataagaatattaaagttattattgatcatacaaaataaacatggactacggttcatgttttttttatatcaaatgattatatgtgaatgattagtaaataaaaagaagatatgatagaataataacaggtgatgaaaatgaagaagttaacgtatattttaatgagtgcggttttattatgtggttgtgtgcataaaacaataacaaaaaataataaggtaaaaatgattgttgcaagtgatatacattattttttaaaagattattatcaggagtgttcatggtttgaagaatctttattatatgaagatgggaaaatggttacatatgcggatgagattattgatgaatttattgatgtggtaaaaaaagaaaagccagatattgttgtgttgactggtgatttatcttttaatggggaaaagggaagtcatcaaggtttagcagataaattaatgaaaatcaaagatgctgggattacggttgcagttatacctggtaatcatgatgttgataatatatttactaaagggtatggaaaagatgattatcttaaagtagaggcaactactgcgaaggaatttagtgaaatatatgcgaagttagggtatgatcaagcaataacaaaacatgagaagtcattaagttatcgtttggatttaaataagcaatattcattattgatggttgattcaaattcacatgagttaacgacaggaacaaagttagatactggaggtcaaatcacaaaagaaacatatgcttggatagaagaacaattaaaggatataaatgaggcaaatcagataccaattattgcaatgcatcataatttagtgaatcataattctttattaaataatggttatacagttaaagattctgagcatttggttgaactctttagtcaatatcatgttccttttgttttgagtggacatattcattgtcaaaatattaaagaaataaatggactttatgatattgcttcatcatctttattagatacaccacttcaatatggaattgttgaaatagatcaagcatcaatgcagtatcatactcagtcattaaagatatctgtatcttctgatgattattttgatcaagtttcaagaaatcgttttgaagaagaagtagaatcaaaagatattttagatttacttgtgaaagccaatcgttattattttactgggaatatcagtgaacatattgatgaactaaaagcaatgaagggatatcgtttattgatgaattcagataataaaaaaatgaaattccatcagcaatatttaaatagtttattagaagaaaagaaaacatctcaaaagctttctattaaattttaaggacgaattgttaaattatcctctttttgttgtcacaaaatgaatgaaagagagtctaataaataggaggaaaaataaatgagaaaagaagaattagatattttaattaaacaagcagtagaaggggataagatagctttagagaaggtgttaatggaggttaatgattttgtttttaatctttctttgcgtatgttagggaatataagtgatgctcaggatgcgacccaagatattttaatgaagattatgatgaaattatcaacttttcaaaatcaatcacattttcatacttgggtatatcgtcttgcaagtcattatttaattgattataaaaaatcaatgtttgctaagcatccacttaactttgagttttatgctaatgatattcaggcgggatatattgattccccagaagaacttattggtcttaataaagaagttttagctaaagaattgaaactttcatgtacaaatgttatgttacaatgtttagacccaatgagtcgatgtgtctttattttaggaacaatgtttaaaataaacagtcaattagctagtgaaatcctagatatcagtgctcaaaattatcgtcagattttatcacgctcacgtaagaagatgcgtcaatttttaagtgaatattgtggtttaagtggtagtggctgttgtcaatgtgaacgtcgtctttgttatgcaatgaaacagcataggttagatccaagtcatttagaatatttgacacttcaacaattagacgaatcattattagaagaatatttagaaacaatggagagatttgatgatgaaatgaatgtgtttgaacaactaccacaatatcaatcacaaactgatattaaagaatttatttctcatattgttcattcagctcatatgaagaaaatgatggagaaagaattttaagaataaatcaatttctatttctatgtatattattattttttgaaaaggactttttatttatagatagacatgataaaataggagtcaagatgataaaggaggagaaagaggaaatgagattaggagctattgaagcaggaggaactaaatttgttgtagcgattggggatgaaaatggaaatattattgaaagagatgcttttccaacaacaacacctgatgaaacagtcgctaatatttttaaattctttgatggtaaggatattgaagctttaggattaggatgttttggaccaattgatccagatttaaatagtcctacatatggctatattacaacaacaccaaaacaaggatggactaattataatattgttggtgctattcaagaacattatccagatttaccaattggatttgatactgatgttaatggggcagctttaggtgaagcatattttggagcagctcaaggtttagatagtgcattatatttaacaattggaactggtgttggtggaggagcaattgtagaaggaaatcttgtacatggattgcttcatccagaaatgggacatatgatgttaatcacaagagaagatgaccattatgctggtaaatgtcaatatcatggaacttgctttgaaggtttagctgcaggtcctgcaattgaagcaagatggggagttaaaggtagtgaattagctgaagatcatccagcatgggatttagaagcttggtatattgctcaagcattagctatttatattttaacaatttcaccaaagaaaattatcttaggtggaggtgttatgcatcaaaaacaactattccctatgattcataaatatcttcaagaaagattaaatggatatattcaaaaagaagaaattacaactgataaaattaaagactatgttgtttatcctggtttaggagataatgctggtgtttgtggtgctttagcacttgcaaaaatggcaaaacaaagataagggagaaaatccctttttctttttataattttgttatttcctaggaaataacaaaaaaaaacaatgataaaaatgtctgcttttaaagaatgcaaccaatagtttccatgtttcaacctaaaatatatagtaaaaacatgcaatagtttcatataataagtttgtaggaggaacataaaatgaatatagaaattgccaataaattattacaattaagaaaagaaaaaggtttatcacaagaagcattagcacaggaattaggaattagtcgacaagctgtgagtaaatgggaaagagctgaggcatcacctgatacagataatcttatagaattagctaaactttatgatatatcattagatgaattgttgttgcatgaaccaacaacaaaagaagaaaagccagaatcacaagaggatgaacaaccagaaaaatatgtgcatattggaatggatggaatacatgttaaagaaaatactggtgatgaagttcatgtttcatggaaaggtattcatgttcatgaaaagggtggagataaagttgatattgatgaagatggtgtttatattaatggggaaaaacgtgaaaagaaagattgggatgattttaaatatgaacatcgttatgagtttccttttggaacaattgtctttttaggatatttaatttatgtcgttatgactggacaatggcatcccacatggattatattatttataattcctctatttagttcactagcaagtgctattcgtaaaagaaagttatcacattttgcttatcctgttttggctttaatgatttttctttggtatggctttacccagtatttgtggcatccagcttggattatctttttaactgtgccttgttattatgcaattgcacattatatagatcatcgaaaaaacttctcatgaagtttttttatttatatgttgacatacaatattatatgacgtatagtattatatgaaaagaaggtgattgaatgatatttaatacaggggcagcattattggatgcaattgtgttatcagttgtctcaagagataaagaaggaacatatggttataaaattactcaggatgttcaagctgttataagtgtcagtgaatcaacgctctatccagttttaagacgattattaaaagatggatgtttagagagttatgataaagagtttcaaggtagaaatcgtcgttattataagataacgagtacgggtattgttcaattgaatatgtataaacgtgaatggtatgaatatacattgaagattaataaattatttgatgggggatatcaaaatgactagaaaagaatttatgagggaattggagtttttactgcaggatattagtgatgaagaacgcgaagaagctttagcgttttatgaaaactattttgatgaagcgggaagtatgaatgaaagtcaagtgattgaagaattagatagtccagcacgtgttgcagcgattatcaaggatggtttaaaaggtcattttgatgaacatatttatgctggtaatgaaggattttctaatgatcaatatacgcaaaattatgaagtgattgatgttgatgataagaaaacgaaaaaatcaaagaaagagaaaaagcaggagagtcaaatgcataatcgatggaatgaaatggattcaagagatcgtttgattttaattgttttagctttgcttgcatgtgtaccattttcattttctatttttcatgtgattggtggtatttttgggggattatttggtgttggtttttcgattattactttattcttttgtttgatttttggattttggattattacctttattttctatattgcatccgttgttatgattgtggtaggaattgcaaatatctttgttttaccaggagcgggttttatatgtattggtattggatttgttttaatggcattaggaagtatttttgggaaagttgcagcatggttttttaaggattgtattccaacaataatcaatgcgattgcagatgggcttggaaaaatattccacccaaggggtgtctaatatgaaaacaatatataaggttttgatttgtttgggtttagggatttgttttattattggtggaatgagtttaaatggaattaatgagatgaatgaaatgactggattaagttttttccattggcaatggcattctaaagaaattggagatagacattttgaatcaaatgaatctgtgaatgaattaaaagtagaattatataaagcacaaatagaatttcatgaaagtcatgatttaaatcatgttgttgttgatgcaaaacaaatttatagtggatttgaagtttatcaagatcagaatcgacttgttattaaacagccacattattggtttgattggggaagtcgagataaatctattattgatgtttatgttcctgcgcatcaccaatttgattatgctaaggttgaaacaaatgctggtaatgttaaagttattaatttaagtgctgattcaattaaacttgcaacagcagctggaaatttaagagttcatggtcttaatgctcaagatttaaaaactgatacaggaatgggacagacatatattgataatctttcaattcatgagaaattaaaagttgacgttggcatgggaaatgctaaaatagtattaaatggtaaagaagaagattaccattatgatgttgatgttggtttaggaaatgcgaaaataggcagtcagcgtttttcaggaattgctgatagagagtcaatgcattcaactcatcaaaaagaaataaaagttgatgttggttttggcaatgttgaaatagaaatggaggaatagataatgaatagtaaaagattatatagatctagacgagatgttatgatttgtggtgtttgtggaggtattgctgaatattttgatattgatccaacgattgtgagattaattgcagtggtattaatctttggttggggttctggattattagcttatcttgtaggagcaattattattcctaaaaatccttatcaataaaatatgtgagacagaaatgattctgtcttttttttgtttaaaaatgaaaagaagggaatcaagattggaagaaaacatatcaagggaaaagatataagccaaaaatcttgtttgtaaaattgatcatcaataaaaaaactgtaacgatttaaaatcgttgcagcttttaataatgcggaataataatatttaaggcatgttttgccactgtgacatgaataggaaaagttgttccttcttctccatcaacatcataaataatatccttatcacattcaatcgtcatttctttagcttgaatatagcgaatgaatggacttttttcatgcgcatttaatttataatctttaaatagagatatcatatctgtagcagaacatttttttataatcaataaatctagctgtccatcttgaatcgaagcatgtggtgttatatctttaaaaccaccaacttgggatgtgtttgtaatcatgaataaacgagcatcttcctcaaattcttcattttcagttttcacttttaaatgtaatgaagtatgaagttgagtcgggagctgtcttattccattgacataataagctaatgggccaaatctttctttatcagttttagaaacttgaaagctaatatcgctaaacattcccccagcaatcacattcgcaaaatatccattattcactttaccaacatccactttcattgtatgaaagtctttgagcatttgaataaattgacgtgatgtacttggtaaagatagatgattagcaaaatcattaaccgttcctcctggcaatatcgcaagcggtgtttctaaatttttttcaatcattccactaatgatttcattaaccgttccatcgccaccaacactaacaataaaatcataatcactaggatttaaagtaagacattgctgataagcatcatttttcttttgggtatagaacacatcaacatgattgacaatttgttgaagaaccatttgaccaatgattttatcaagtctcttttgaattgtctttgttcctgaacttggattaacaataaacaaacatcgcatacagttcacctctttgtcttattttatcataatatgagtaaaaaacatagaaaaagagatgtcaccatctctttgttagaaaggaatatcttgtttttcgtaaacattatttctaattaatcttaataataactctacaccttttttcatcatcgtaattgaaacaaattcatatggaccatgacaatagaaaccacccgttccaagattaggacaaggtaatccttgataagaaagtcgagcaccatctgttcctccacgaattggcactattgtcggatggagaccaacatcttgcatagctatttctacttgttcaacaatttcaggataatcttttaagacatctttcatatttaaatattgttcatgaatggttacatcaaccaattcataaccataaagactatttaaataagcttgaatacgtttaaaatcattgatttgattttttaattttaaataatcatgatttctgacaatatattctaaacgtgttttttcacaagttccctgcatatgatttaaatgatgaaatccttcataaccttcagtaaattcaggtctttgttgaattggtaaaagttgattaaaagtttgagcaacttctaaagaattaatcattttgtttttagcactaccaggatgaatagatttaccagtaatttctacaagcacttgataagcattaaagttttcaaaataaaattcattgatatctccaccatcaattgtataagcataatcggcatgaaatgtttcaatatcaaaatgttctgttcctcgtccaacttcttcatctggggtaaaagcaatttgaatatcattatgtttaaattcaggatgtttgaacatatattcagccatactcatgataatcgcgataccagctttatcatcagcacctaataatgttgtcccatcagttgtaataagatcatgaccaatgactttttgtaaatctgtaaattcttgaggatctaagatcaaatcatcatgtaaagtaatccgtttaccatcataatctctgatgacttgaggatgaatattttccccactagcatcaggtgatgtatccatatgggcaataaaaccaatcacatctccttgatgatcattattagatggaattgtaccataaacaaccccatattcactcatatgtacattgactaaccctaaaatacgcatttcttcaactaaaaattcagcgagttctttttgacaagcagttgaaggtgttgttgtggaataataatcagattgggtattaaaacttatatattttaaaaatctattttctattttcataatgtaacttcctttccacattattatatcaataattcaaaatcatcacaatataattgtatttatactagccaaatgaccgatttcttattataatggtcaatggaggttttaaagatgagtaaattttatgccgtaaaacaagggagacaaacgggaatattttcttcctggaaggaatgtgaagcacaagtcaaaggatttaaaggggctatttataaatcatttgcatcaaaagaagaagctttaacttttttagatgaatcaccaattgtttcatcagctgatgggttaattgcttatgtagatggtagctataatatcaaaaccaaagaatatggatatggctgtgttttattggaaggacaaaatgttatagcaaaatataatggtaaaggtcatcacttggcttatgtttctatgcgtaatgtagctggtgagattgctggggcaagatgtgctattgattatgcaattgaacatcactatccaatgatttgtatttactatgattatgaaggaattgaaaagtgggcaaataagatgtggaaagctaataaagaaggaacaattgcttatcaaaagtttattgaagaagcacgtcaacatattgatattgtttttatgaaagtattagcacatagtggtgatttctataatgaaatggctgatggattggctaagaaggcagtggggattcaatgaaagaaagaataacagtttttgatattgaggttttaaatcaagatcctgcaagtatttgtgcaattgggattgtcgaactcattgatggagaaattacttccacttattattcacttattaaacctaaaaacttaagttatgatgcttatcgctataaagttcatcaaattaaaccaaaatcactatataaagaaaaaacatttggtgaagtttggcaggaaattcatcattattttgaagaatcaattgttgtttcacatgatattcaaggtgatatgatgaatttaagagcggcttttaaacaaaatcgtattccttatcctcatctttatatgtcatgtaccaatgttttagctcatttggtttatcctcatttacataaatataatgttaaagagttatcattaatgattggttttaattttcaagctcatcaagctttagatgatgccaaagcttgtgcgcagattttaattgaaatgttaaaacatgaagattgttccacaataaccgctttacatcaaaaatttcgtttagaatttggggaaatgaaggaaaactattatcgtaatattatttctgcagaagttgctcctcaattattagaaatgaatgaacgaactgattctttattgtatcatcaatctgtttgttttactggaaagctttcgatgccaaaagaaatcttagaagaaaaaaccaaacaaatgagtggtttaccatcacatcaggtgagtacacaaacaaattatttagtgattggtaaagaaggttatcataaagttcgttttggtaaagaaaataaaaaagtgaaaaaagctttacagttaatgaaacaaggacaggatttaaaaattattcatgaaaatgaatatcttaaattattagaaacaaaaagataaaatttgtttcttttttctttagaaaatcttttgaatggtttcattgcaccatggtaggaattgaggtataattgagaagatttgaggaggggaatcaatggaagtacgagtagcctcaatacaagatgcagaagctattttagcaatttatgcaccttatgttgaaaaaacaaatataacttttgaatatgatgttcctagtcttgcacaaatgcaaagacgcatcatgacaactttagaaaaatatccttatttggtattaatagatcaaggcaagcttgttggttatgcttatgctggctcttttgctagtcgtcaggcatatgactgggattgtgagctttctatctatgttgatagtcatacccatggacgcagttatgggcaaatactttatcaacatttaatagctattttaaaaatgatgaatattcaaaatgtttatgcttgtattacacatcctaatgaaaaaagtgagagatttcatgaattgcaaggtttttcatatgttggatgttttcatgcctgtggttataagtttaaccaatggcatgatatggtatggatggaaaaacacattgggaattcaaatatggttttaccagttatccctttttctaagattccatcaatacaaattgaatcgactttacaaaatgagtatgttcaaagcaagaagattatgatatgatagacgatagaggtgagaatgtggatactttaattattggaagtggttttgcgggagctacagttgctcgaattttagctgaacgtggggaaaaagtgaaaatcatagagaaacgtcctcatattggcggaaactgttatgatgaatatgatgaatatggtattttagttcataagtatggaccacatatttttcatacaaatgatcaagatgtttttgagtttttatcacgttttacttcatggtatgattatcaacatgaagttgttggaaatgtctatggaaagattattcctattccgtttaacttaaatactttaatgattgtttttggtgaagaaaaaggacaagcattaaaacaagaattaattgatacatatggtgaaaatgcaagggttcctattttagagttacaaaagagttcatcacaagggattcaagaagttgctcaatatgtttatgagaatattttcttgaaatatacaatgaaacaatggaatcaaaaaccagaagaagttgatcaaagtgtcacagctcgtgtgcctgttttaatttcttatgataatcgttattttcaagataagtatcaaggaatgcctaaggatggttatacaaagttattcgaaagaatgttagatcatgaaaatattgatatagaattatctaaagatgcgaaggaagatttaacttttgattttgaaaatcataaaatttattatctgaatcaagagtttaaaggaaagattatttttacaggagcaattgatgagttttttgataatcgtttaggtcaattgccatatcgttctttacgttttgattttgaacattatccacaagattattatcaatctaaaggggttgttaattatactgtgagtgaggattatacgcgtattactgagtttaaatatctgactggacaactttgtcaaggaacgacaattattaaagaatatcctgaagtttataaggataatcgtcaagttccttattatgcgattttaaatccagaaaacattatgatgcatcaaaagtatgtagatttaatgaaaccatttgaaaatttctatttattaggaagattagctcaatataaatattataatatagatggtattgtaaaagctgccattgatttaacaaaacagttttaggaggaaaactatgaaatatttaagtgttgcgattccgtgttataattcacaggaatatatggctaaagccattgaatcatgtttaattcttaaagatgatgtggagattattattgttgatgatggatctaaagataatactgctcaaattggtgatgagtatgtcaaacaatatccagatacaattaaatgtattcatcaagaaaatggtggacatggtcaagctgtgaatactggtttaaaaaatgcgacaggactttattttaaggttttggatagtgatgattggtttgatcaatcagctttagtgaaggttattgaaacaattaaacaattacatcaaaaagctgatgatgttgatatgttaattgcaaactatgtgtatgaaaaacctagtgaaaataaatcaagtgtcattagatatacaaatgcattaccacaaaatagaacatttagatggtatgatgttaaacatttctatccacaacaaaatttattgatgcatagtgtgatttatcgtacgcaattgttaagaaattgtaatttacaattacctcaacatactttctatgttgataatttatttgtttatcaaccattaccttttgtaagtacactttattatttaaatgttgatttatatcgttattttattggtagagaagatcagtcagtcaatgagaaagtaatgatttcacgtattgatcaacaaattaaagtcaataagatgatgattgattgttgtgatgtgatgaagttaaagagtcgtaagttacgtaattatatggtgaagtatttaactatgattacaactgtttctaccgttttattaattaagtctggaactgaagaacatttacaaaagaagaatgaattatgggcatatttgaaacaaaagaatcctgaattatataaagcagtgaaacatacaacacttggaacttttatggaaatggatagcattgctggtaagaagattattactttaggttattcaatttcacaaaagttatttgggtttaattaatgaagaagtggttatctgaatataaacatgcatgggtatttctttattttgtaatctatttaccttggtattttggattgcagcaaagaggaaatatgggattccatgatgtttatacatcaatcgatcatgctttaccttttgtttcatggtttatttatccttatatctattggttcttatttgttgctggaacaatcgcttatttgttttttactcataagaaggatttctatagatgcgtcgcattcttatttataggaatgacagtttgtttgattgtttttaccgtttatccaacaagctttgatcatcgtcctgaagtcattcagggaagtccccttgcaacatttttagtgaactttatttatacagctgataagagtcagaatgtttttccaagtattcatgtctttaattcaattggctgtgcgattgctttaatcaaatgcaatgattttaagcattcaaaaggaatgataacatttgccagtgtatcagctattatgattacactttcaacaatgtttattaaacaacattcaattttagatgctatttcagcatgcgttttagcaattattctttatattcttatttataaattagatgtctttaaaattgaagaaagagtggatgatcaaaatcctcgtcttttcaaaaatctaagcaaaataagcaggtaatatgttgcctgctttctttatatatgataggaggttatatcatggcaacgaataatcgtttggcacatgaaaaaattattaaattacttttctctttagcaattccatcaattattgctcaacttgtaaatattctctataacattgttgatcgtatttatattggtcaaatggcaaatggaacaattgcaatggctgctttatcagtaactctacccattgttacttttgtgagtgcttttacacaacttgtaggggtgggtggagcaccactttgtgctattcgtttgggggaacaacgaaaagataaagctgaagaaattatgacaaatagttttgttttattaattatttgtggtttggttttaacattattgattcttttctttaatcgtccattattgttgttatttggggcaaatgaggagaccttggcaccagctatttcatatattagtatatatgcattaggaacaatttttgtgcatattacgctaggtatgaatgcttatattaatacccaaggttttgctaagattggaatgtatacagttgtgattggtgcaattattaatattgttttagatccacttttcatttttgtttttgatatgggagttgctggagctgctttagcaacgattattgctcaaggagtttcagccatttgggtgcttattttcttgtttggtcaaaaaagtattattaaaattaaaaaagaatatctcatccctcgtttaaagattgttttggcaattatgtcattaggtatttcaccttttgtacaaacagcaacagaaagtttgttacaaatatcattcaataatcaattattgatgtatggagggactatggcagtcgcaacgatggctatcttgatgagtatttggcagtttattaccttgccattactaggtttatgtcaaggggcacaaccaattctaagttataactatggtgcaagaaattatacgcgtgtaagagaaacctttcatttgatgtttaagctttgccttggttttgctatgggagcgtgtattttggtgattatcttttcttcattctttgtatctatttttacaaaagatgcaccaactattcatttttcgtcatgggcattgcgtgtctttttaattggtgctggtatgtttggggcacaaacagcctgtcaacaagccttcatggcattaggacaagctaaagtttctgtttggatggccataacaagaaaaattatcttgctgattccttttatttatatttttccatatttattaggagaaacaagttttgcctttcatatgtcaacttccattgcttcaatggtttatgatgcaccacgagtttttgcggtattatttgctgaacctgtttctgatatcttagcagcgtgtatcacaacttcaatgtttattcgcttttatcgtaaggcattaaagcgtccagatgatattattgaagaataaaaaaattattacttaaattgtttcttttgtttatttgtggttaaatagttaaacaaagaggggtgaaagtaatggaaaagagtttaatttcaagaattttagagatggatccagcggctcgtaatcgtgtgaatgtcatcttgaactatcctggattacatgcgatgttcttttatcgtattaatcactttttatggaattgccatcttaaaatactcgcaagatttttaagtcaatttgcaagattcttaacaggaattgaaattcatccaggagcgactatcggaaaaagattttttattgatcatggcatgggggttgtgattggtgaaacaacgattattggtaatgattgtaccttgtatcaaggggttacattaggtggtgttggaactggtgaacataaggttaaaagacatccaactctacaaaataatgtaatgatttcttcaggggcaagaattattggtgatgtgacaattggagataacagtattgtgggggcatcttcagttgttttaaaagacgtaccaccaaattgtactgttgttggggtaccagggagaattgtaaaagaaaatgggattagagtcgataaagaattatagaaaatatattgtgatatcattgatgttattggtgattgatttaatatgtttttatcaaggatattttgaaaagatagatgtgactttctatcaatttctagccagctttcaaagtgaacacattacaatgttgatgaaaactattacgttttttggttcaactgttggggttgtgatggtttgtttaatatgttgcttgtttcattttcaaaagggacttttattaagtatacatgtggctatagttgctattataaatcaaattattaaagttatagttgctagaccaagaccatctgttatccatttggttgaagaaaatagttatagctttccttcagctcatgcgatggtttcaatgacactttttggattgattgcttattggctttatcctcgtcatcgttatcttgctatattgatattggtgattcctattttcattggtatgacacgcatttatttaggtgttcattatacaagtgatattattgctggatttttattttctatcacttatttaagtatcgtgatttcattaatgaagaatcataaatggccttctttttcataaaatgaacaaggaggtttttttatgccaattgatcttcaagcaggactttattattatggtttgggattgttaaaaagagaaaatcatctttattgtttggttgatttacaaactggggaatggtatgaaaaaatgacaatttattatattgagaaattattaagtcaatggaatcaaataagaatatcccaatatcaatgaatcataattgaattttttattaagccatgttagaataaacatgttgttattttaacatgcttaatgtctttgtagctcagtaggatagagcattcgcctcctaagcgaaaggtcagcggttcgaatccgctcaaggacgccaattttactgataaatagagtgtttattgaatttttagcagactgatttgctttcaatttatagaaaacattctattcatttcattagcaactaacatttgtgttggttgtttttttacgttagttaaacttttttatagttgttttactaaaaatcatatttttgacagaaggcatattctttggctagtaaatctctgtatttatgatttctaatatctatttcacgataacatccatttgctataggaattgttttttaatctacaactgataatagattttttatttcaactatatcgtttttatgacttttttcttggatgatatttttataggtaataaatagtaaatatcagtatttttaagctttaaatgttgttgctacatatcgctagattttttaattaaaatttattttttgatgcgtaaagtagattgaaaaaatactttttaattggtaagttttttacaaatttaactcttatactatttattctctatatatgttaaaatagatttatgatatataaaatataggataagatgggaggaaaacaaatgagcataaatgttgcttggatagaagaacaagcagtgaatgcaaatgcattaaaaaatgggagagctatttatcaaagtggtaaatttataaaattatatcgttcagcagatgagactttttatatgggagaatgtcttggtagcggaagtaaaaattatatcacttctgttgattttcagaatcaatctcatccgatttttcgttgtaattgtcctagtagacaatttccttgtaaacatagcattggattattatttgctattgaagataaagcaaactttgagatttgtgaaattcctgaagatattgtaaaaaaaagagaacgccttataaaacgtgctcaacctaaagataatacagagaaaaagcctaaaaaagttaataaaacaggacaaaagaaacgttggatgaaacaaaaagaagggttgtttgtttgtgaaacaatgttgcaggatgtcacgcgaatgggagttgctgcttttgtgaatagtcaactaaaagattatgaaaatatagcaaaacaaatgaatgattattatttacctggaatccaacgtctcatcttagaacttgttattgaagcgaaaaatgcattgactagtgatgctgtttatgatggtgtaattgcaaacatgcttcgtctttatcaaattgttaaaaaaggaaaacaatatttagataagaaaataaatgaagaagaaattacgcaagatgatcaaatcatggatgaattactaggacatgtttggaatttaaaagaattaaaagaagctggtttttatgaagaaaaccaagaattcatacaattaggattttgtagtaaaaatgaagatacattacaaattggttattggtatgttcaccctctccaagagatacataaaacagtcaatatgcgccctttaaaagttgctaaatacattaaagaagatgacagtgttttagaaaaagtgagaacatcttgtttatatctctatcctggagttaacaatcgtcgtatgcgttatgatgaaaactttacaacttgtgatattgaagcacaagattatttacatatacgagaaattgccaaaatggattttgaacaagttataaaggaagtcaaaaatcaattgaaaaatcctttatgtgatcaagaaatagcaatcatattagcttatgagcaaatcaaacaaaaccaagatgattttgttatggtggatgaattcaatcatcaattaaaactttcagcgatggaaggaacatcattacatgcattgacaacactaccttcacaaaatctactatcaaaacagtgtgctttagttattttttcttatgattatcatacacatcatttattagcaaaaccgatgagtcttatcagtaacgaacagattgttcgtctactttattaggaggtgttgaaaatgttacaacaaattttattagaattacaatcacgctttcaaacaggcttgattgcaggtagtcatattttgttgagtgatgaacgccttcctatgcttttaaaaaaggttgagacattggctcaaaaatcacctgtatttcaaaagctctatactctttgcctagcaatatttaatgatcaagaccatttagaaaacaatattatggaagctatgtcttttttagatgctttaattatgacacaggcacaatggaaatatgaagaagatacctatgatattacaattcttactgaaaaaccttataccaatatcaagtattcacaattaaaaccattgattcaagcattaagtcaaccaggaagtggtcgctatgaaatcattttatcaacttggaataaatatcctgatttatttcaagattatcgtgttttaccttatgtcattgccggattaggggattcttattctgaaatcgctaatttatgtgtggatattttaaaaagttgtggtaagaaagttgtacctcttttaaaagaaaactttaatcctagtggtaaaaaagaaatgttaagaagaatcagtttaattgtagaattagctggtaaagatgaaaatcaattttatttagatatgtatcctttatctcaaacagatattcaaaagcaaatcattataggattatcttacaactctacaaatcgagattttttaatgaatatagctgatgtagaaagaggaaaattaaaggaatatgcactttatgcattgagtcatatccaagatgatgaagtagataagtatttattaaagaaaataaagaaaagtcaaaagactttgttttatacactctattctaacaatgaggatattaagcaaataatatgtgaagatattcaacaacaattatctaaaataatgaaatatcagcaaattgaaacagataaagaagcagttgaaatcataaaaaaattatctttattagcatataaaacaggtccacaaattattgatattgttgcttggatatttgatcatgatgataagctatgtatggttaaggatagtcaacaacatttatttgttcaattggataattatagcaatgtaactccattgagctatacggaacttgaaaataatcgttacacaatcacagaatatgttgcagaagttatcttgaatacctatttggtttatcaaaatgaagaaagtgaaactttaataaagacactttatgaacgttatccacaattcatggcatcagcttatgcacgaatgttattgattaaagattataaacatgcttatgaaacattaacaacactcattgactgtcaaaaaccaagagatttttattcacgtatcttccaatatgttgaatatgaccaagaaacaaaacaatatgtctatcgttcaaaactgatatcatatccattaaaaacagaagttataactattgttttaggtgatgaattagatcatcgttggattgatttgttattaggaaaacaacaaataacaaaaggattgtttaaaaaagaagaaatgatagtctatggtaatgaaattccattatgtagctgtattatggttcatttggcttcaaaggataatttagaacttaaagatactttgattgcatattttgaacaacataaatctacagcttgtcatttgtatattgaaaaattatatcaattaccattaagagatgatttactcgcttattttaaaaaacaaaatacatttttaagcagtaatcgtttatcttatcatcaaatggtttcaatgtgtgaaacattctgtaataaaaatgatagtttatatgttttaaaagaaatcttaacttatttaaagaagaaaacaaaaagtgattatgcatggcaattttatgaaattgaaaatgctattaatcgttatcaagaaagtgaggaaatcatctaaatgaatcaacaagaatatcaacgtttaccggctgaaatcctatttcaattagaaatagagaccttaattaaaaatgaaaaatatcctattcctgaaggatggaagatgtcaccacgttcagttttaacttatatttgtggaggtaaaagtgggaatatggacattactcctaaatatattggaaatgagcgtttggttgaaattgcgattgccacacttgtaactgaccgcgccttgcttttaattggtgaaccaggaacagcaaaatcttggttaagtgaacatctatgtgctgccatcaatggtgattctacaaaagtgattcaaggaacagcgggaacaagtgaagaagcgattcgttattcatggaattatgcgatgttgattgctaaaggtccaagtgaagaagccttagtgaaaagtccactattaaacgctatggaaacaggtagtattgttcgttttgaagaaataagtcgatgtgctagtgaagtgcaagatgccttgatttctattttatcagaaaaacgtgtttctattcctgagttaaatatggaaattcctgcaaaaagaggtttctctttaattgcaacagccaatacaagagataaaggtgtcaatgacatgtcagcagcgttaaaacgacgttttaatattgttgttttaccagcccctaaagatttaaagacagaaatggagattgttgaacaacgtgttggacaattatctgcttcacttggtttacaagctaaagttcctagtgcagatgttattgaacgagttgtaactatttttagagagttaagaaatggaataacaatagatggtaaacaaaaagtcaaaacaacaacgggggttttatcttcagctgaagcgatttctttattggctaatagtatggcattagcagctagctttggtgatgggaaaatccgtgttcaagatgttgctgcaggcttacaaggagcaattgtaaaggatgaatcaaaagatgcattggcttggaaggaatatttagaaaatattttaaagaaaaaaggcatgtcttattatgatctttaccatgcttgcatggagcttaatcagtgatggaaaatatttttggaatccgtcatttatcaccagcatcggcttatcacttaaagcattttcttgagcaaaaaaagcctcgctttgttttaattgaaggacctagtgattgtaatgatatgatagaagatattgtgcaagatgatttaataccaccttttgcaatgatgtcatatacaatagatacaccgattcaatctttgttatatccatttgctaattattcaccagaatatgttgctatgaaatgggcttatcaacatcatattccttgtgcttttatggatttgccttcatcagcttttttaacaatggaagaatctcaattacaacaagataaagttattgatttggatatggatgttaatgatcaatgggaacgtatttttgagcatgtagatgatacatttcagtttaaagaagcagtaactttgtttgctcatcacttacgtgagcttaatccacctgatgggcaaacttgtttacgtgaagcttatatgaaaacaacgatagaaaaaatcaaggaaacaggtttattagaagatgatattgttgtggtttgtggagcttttcatattgaagggattcaacaagcaacatgtttaagtgataatgagtatcagaaaatcaatcaaaaattagtcaatcgtactttgatgccttattcatattttcgtttatcatcactctctggttatggagctggaaataaagcacctgcttattatgagttattgtggcaacatatgttagaaaatcaacctaaacaagctgcctatgattatctttcaagaatctctttatatcaaagagaacatggttataactgttcaactgcgcaggtgattgaagccctgcaattagcgcaaatgctagcagctatgcatcaagaaacattaccatctttacaagatttaaaagatgcagcaattgcttgtatgggacaaggaagcgaaagtcaattaatggaagcttttatagctaatgatattggaacaacaatgggatacttacctaaaggtatgtctaaaacagctattcaaaatgatttttatagtcaattaaaacaattaaaattagaacgttttcaaactattattgccactcctttagaacttgatttacgcgaaaacacaactgtaaaatcaaaaaattcagcttttttagatcttcatcgttcttgttttttacatcaattgcgttttttagagattcctttttgtgcattattgcctaataaacaagatactgcagattggaaagaaacttgggagttaaaatggagtagtgaagctgaaattatcttaattgaaaattcattatatggtgaaagtattgcctatgcaactcagttttgtataaaacaaaaactagaacaaagtactaatatgagtgaatgtgcttttttaatggaagaagcttttttatgtggtttaccagatagtttgttacatgctttgcaggctgttcaatccttagcaattgattcttcatcatttgaagatattgtttcaactgctaaacgtttaagtcgaattatgcgttttggaaccttgcgacatagtgccaatgaaaatattgaacccttatttcatcaattgttttatcgtgcgcttttgttatgtgttgaaagttgtcagtgtgatgataaagtagcacatacaatcatggaagcaatgaaaacaatgaatgatttatctattcaacatgatcattatatggaagaagaatggttacaagttttagttgaactgattcatcgtgatgatatgaatcctttcttgagtggttatgctacagctattttgctagaacgtggattcttacaggagaatgattttcaacagattcttacttatcatatatctcaaggaatacctgtagatattgcagctaactggtttgaaggttttatgatgcgaaatcactatgctttgattgcacgttcttttgtttggaaacaacttgatgaatatattcaagatttagatgaacaagattttttaagagcattgttatatttaaggagagcttttggaacttatagtgcaaaggaaaagcatgatatagctaagaatttaggaagtttatggcatttggatgaaaatagtgttgcggaagtattaaatggagatttaaagaaggaagaacaagatcttttagatgaattagaagattttgattttggtgatttttaatggaaaagaataaagaattattacgttggagattgattctcggtgaagaaacacaaaatgattttcaagacatggataaaaactttttgttaagtgataaggatttactgatggatgcaacattatcagctatttatggaagtaagagtatacaaagtcaaagaggtggggctggcaaagagtcaagtcgaccaaatatttctaaatggatgaaggatttacgttcgttatttgatactgatttagttaaagtcattcaacaagatgccattgaacgtaatggctggaaagaacttttaatggaaccagagttactagaacaattagaacctgacttagaaatggcaagtgtcttattaactttaaaagatatgattccttctaaatcaaaagatcaagcgagaatctatattcaaaaaattgttgatattattaatcaacaaatcgcaacagatttaaaacgtagtgtatttgcagctatccaaaaaagggaacattctgttttacctagttccactgctattgattttccatatacaatacgtaaaaacttaaaacattattctcctgatttaaaaacaattattccagaacgggtttacttttttgatcgtaaacaaaagagtaatcattttcatgttattttggatattgatcaaagtggttcaatgtcgagctcaattatgtattcttcgcttacggcatgtattttagccagtatgaatgctgtgaaaacaaatgttattgcttttgatacaacagttgttgatttaactgatttatgtcaggatccggtagatttgttatatggttttcaattaggtggaggaacagatattcataaatctgttaaatattgtgaacagctcattgaacagcctgatcaaacaatcttctttttgatatctgatttagatgaaggtggcaaccatgctggtttattgcatcgtttacaagaaatacaagaatctggtgtaacagttgtttgtcttttagctatccaagatggaggaaagccatattataataaagacatggcacaaaaagtcgctaatctagggattccttgttttgcctgtgcacctttaaaacttcctgatttattgtatgcagttttacaaaaacatgatttatcatcattttcataataaattgtatttcaagaatagctgttataaaatcttgactttcgaagcagatatattgaataaatgagtactataaaagggaaaaaacttgattatataaggtgttttcccatttttgatatgcataataaaagctgaaacagctacattttattgtagtgtaatttctagtatttcaacaattttttgaatttttctcttttttcgtattttttatcaagattgacattaaatgcttttgaaatgtcttctatgattctatccttatagataaactgatatatattcctgtctatatttatacaattgtattttttggctgatgtaataatttgatcagctgtatatttgtagccacgttttctttcaagcagtctcataatagctagtgcaataaagcatgtgaagaaatgtcttttgatatgttcttttgtccacatatatgggtcttgttccaaaatttgtttttgatactttaaaggtatcttctattttagataacactctatatatctttcttatttcataattattaagttcattataggtatacttgaaaggaagataaccaatcttttgaataagacgttgccttggctcaccgttctcatctcgataagcttcaacgattgagagaaaagttctgccatttttatatttagattttttaaggaacatagtatcacatccaatctaatactattacaccataaaatattacattatactataataaagtggataaatattgacaataaaaaagtatcttagataactaaaatactagatataatcaacacattgaggagagggtctaattggttttgcaaaattatgcttcaaaactcggggaaaatcaatgatatgaaaggcatagattaaaaaatctatgttttttattttgacattttttgcgttttgatgttgactgacttgtaacaaggtgttatattatgtatataaagttgttataagatgtaataaaacaagtaggggggatttatatgattgaaattgttaacggatatgcatatattgaggatgtgaaaaaattaattgaagcttattataaggaattagatagaaatttagattttcaaaatattgatgaagaattaagtcatttacagacgaaatatcaagaacctcaaggaaaacttttggttgcattaatgaatcaaaaagttgttggttgtgtagcttttcatcaatttaaagatgaagtatgtgagatgaaaagattatatgttttaccagaatcgagaagttatcatattggtcaacttttggttgaagaaattattaaagaagcaaaacaggcaggatataaggaaatggttttagatacaatagaaccattaaaaagtgcaattcatttgtataaaaaaaatggctttaaagaaatcgaagcctattatgaaaatccaatggatgatgtcatttatatgaaactagatttggggaattagaaaatgaaattaacaatgttaggaaccggacatgcggttgttacaaaatgttacaatacttgttttgtattgagtgaaaatcaggaatatttattagttgatggtggtgggggaaataccttgcttactcaactcgaacgtgctcatatcaaatggcaggatattaaaacaatctttgttacacataaacatttggatcatattacgggtattttttggatggttcgtttgattacccaagcaatgaatcaaaataaatatgagggtgaagtttatatttatggacatgatgaagtgattcagattattcatgatgttgcacatatggttcttcaagaaaaggaaacaagatttattggggatagattgcatttggttgttattggtgatggagaaaagaaaaagattcttaatcatgaagtgacattctttgatattcattcaacgaaagcaaaacaatatggttttacaatgcaacttaatgatcaggaaaagttaacttgttgtggagatgaaccatataatgaatgtaatcaggaatatgttaaagaaagtcaatggttacttcatgaagctttttgtttatatagtgaagcagatatttataaaccttatgaaaaacaccattctacagttaaagatgcttgtcttttggctgaacaattaaaggttaaaaacttagtgttatatcatagcgaagatcaacatattgatgaacgtaaaagattatatagtgaagaaggtctacagtattatcaaggaaatttattcattcctgatgatttggagagtatagaaatataaaataaaaagtatcttaaattcttgttagggattgagatactttttttaacaaatttattgtaatcgctttctttgaatgatatactaagatttgtaccaatgaattttaattattgtattgaatggaggaaaaatatgagattgaaaaaagcattgaaaggttttatttcattatttttaatgttttgtatgctgataagtcaagcaccattaaacgtatatggattagaaaaagaagtaattaagcaaccacttgtatttgatgattttgagggaaatagtcagatttcaaatacaaataattgcctaacttcgcttgaaagtttacaaggtcatggaaaagttgcaaaacttgaagtagaaagtagtgattggcctgatgaaaagaatcgtagtttaaaaataacaagaactgctaaagatgtatctacatacaaatatttaacattttggataaaagatacacaaggtggaaatagtgccagaatttatttacgtgatgaaaatggaaatatcgctggtggagattggacaaatgatgctgttttaaataaatggactcaattatcattggaattgagtaaatttaagaatattgatttaactaaaattactgaaatctatattggtgagtggaatagtggaacttattatattgatgatgttcaatttggggatcaattagcaaaagatattgttataaatcctaatcaagctactggaatatataatgatagttttgatttatcatttgatgtgaaagcaggagtaaagctttattatacaattgatggtagtgatcctgttgttggtacaaatgaatatacgaaacctatcacaattgatgatacaacaacacttaaagttgttgctgtggataatggatatgttagtgatgtacatgaatttgtttatacgattaatcatgttgatacaataaatcgtactccaaaagttgttcaaacatttgaacaagataatgttaatgtagaagctgctacagatgcaaaagcgacaattgtaaatgatgtgaaacatagtggacatcaatcattaaaatatcaaaagaacaagtctgaaggtgcttcagtcaataaaggaagtattaaaattgattttaatcacgctgttaatgttgaaggattaaaatattttgcattctatattaaagatacgcaaggtagtaatacaatgcagatatcattaattgatgggcatgggaaagaatcttcttttggttggcgttcaccatcaactgttaagaataaatgggtacaatattatgttaaagtaagtgactttacaggtattgataaaactcaaattactggtgtacgtctaggacaatggaattcaggtgattattatattgatgatatctattttgataattatttatatactggattacctacaattcaacctgatgttccacaatcaaattatcaaagtgcatatcgttttgctgataagatagaaattgaattaacaaataaaagtgatgctccaatgtattatacactagatggtagtcaaccaaatgctgatagtttattatacacaggaaaaattaatttaaatgatacaaaaacattaaaggttgtaagctatgacaatggaaaatatagtgatgttgtgacttataactatattaaagatgaacgtgtttgtagtgatgtacaaacaaataaagttccaggtaaatattcaaaagcaatgaaagttacattatcaagtttgaataatgaagatatttattatacacttgatggaagtaacccaacaacaagcagtcatttatatactgaaccaattgatgttcatcaaacgactgttataaaagcaatgacttatagtcaagggaaaacatctaatattatgacatttaattatgaatttcctagtgtaccagctcaggtgacatctagtgttgaacaaactattttatcatcagcaacaactattgaattgataagtgatttagatgctactatttattatactttagatggtcaagaaccaacgaagtcatctcaacaatatactcaaccaatgactatatcagcttcaacagttgttaaagcaattgcagtgagaaataatttaacttctaagatatcaacaattcactatgttattgcgccagaagcagtacaagctgataaaaaagcgggaacttatgtaggttcaacaattgtagaatttagagttcctcaaactgataaagtagaaatttattatacaactgatggtagtgatccaacaattcaatctacacattatagtggaccaattaaggtgactaaagatacaacatttaaagttgctgcaacttataagggtagtgatgatttaggaaaaatcacaactcatcaatatacgattcaaccagtgacgacattattggcacctgaaattactccaagtagtggaacatatggacaaagacagttggtatcaatgtcatgtcaaactgttgatagtaagatttattatacaactgatggaagtacaccaacatctcatagtcaagcatttacaaaagatttttatgtaacaaaagacactgttatcaaagctatttcagtgaaagaaaatcaagtcagtgatgtggttacacataatattcaaattactgaaaaaacatctccatttttaaaaactgatggaaaagtcatgagaaataattatggagctggtgaaattgtacaattgaaaggtacaaatattggtggatggcttgtgatggaagaatggcaatgtccaacatcagcacctgatcaaaaaacaatgttagaaacatttacaaagcgttttggtgaagaaaaagcttgggaattgattaatatttatcaagataattggtttgatgaaagtgattttaaagtattgaaagatgaaggagtcaattgtttaagattaccaattacttattttgaaatggcttatttagatggaacattaaaagaaactgcttttgaacgtttagattggtttattgaaaaagcaagtgaatatggtatttatgttttaattgatatgcatggtgcttttggttcacaaaatggtaaagatcattctggtgatataacgattccagataagggagatttctttaataaagaagaaaatattgtaaagacaatacatttatgggaagctattgcgaaacgttataaggataatgaatgggtagctggttatgatttgttgaatgaaccaggtggagcagtagggactaaacagtttgaagtttatgatcgtatgtatgatgctgtgagagcaattgatcaaaatcatattattcatattcaagctatttgggaaccaattcatttaccagcccctgaattatatggatgggaaaatgttgtttatcaatatcatttctatggttgggatgatattaataatttagaatatcaaaagaaatttattgatagtaaagttgattatgttaatcaacaaacaaattataatgttcctgtatttgttggagaatttacattctttacaaatactgatagttgggaatatggtttgaaaacttttgatgaacaaggttggtcatatacaagttggacatataaagtagcaggtgatggaagtagttggggaatgtatacaatcccaaaaaataatgctacaaatgttgatgtcaataatgattcatatgatgatattgtgaaaaagtggtcaaaatttgattttaagagaaatgatagtattactgatgttttaagtaaacattttaaagaaacatctcaagatacacaggcaccagttattagtgggaataatgcaataattgatgttgtaaaagatgaagtatctacaagtaaacaaacgattattgaaattatcgatttatttgttaaggatttccacgatggagtgattcatgtagatgactctatgataacaactgatttaaatgtcaataaagttggagaatatcatgttaaagttgaagtaagtgataaagcaggaaatcaagcaacgcaagattttgttattaaagttgtggaaaatacaacaccagatgttccagaggaaccagtaactcctgatacacctcaacaacctgataatccaaatatagatattgatatagataatggaaatcatggatcaaatgttgacaataatgaatctcaacaaagaccaaatacaagtgatcaaactatgtttgtaagttcattattgctaggtggaatggctcttattggtatatacttattaaaaagaaaagaattacaataaatataaatgacaggaaattttaaatttcctgtcatttttaaaaggattcatctttttaagagtttttattctacggtcataaagaaatgagcaagtttataattataaacaatttgagatgaattaaacaatgttccatttgttaaataaatatcatcttcaataatgatagcgggatcatttttttctaattctaataattgactttcttgatcagttaattttctggcactaatatatttatcagaaaaaccaaaaggtatttttaaatcttctttaatatatctaaaaatagaagattcaataatttctttatcaagataaggaataatatttttattataataagtatattcaattgcataaggaatatcatccacaatacgaagtctttcaatataatagattggtgttccgatttcacataacataatttgagctaaattatcatcagcttcaacaatttctacacttaaacatttattcgtgagtttattaccaggatgatctttagtaattcctcttgtcccactgagaaaaactgtatcacatttacgagattctctaataaacataccacttccttgtacaggatagagtaaacctaattttgttaaaattttaattgcatttcttacagtatttctactgacattgtattcttccatcaattgatcttcagtaggaatttttttagtttcattaaattcatgattatttattctatcagctaaactattagcaacagtttcatattttgtcataattacacttcctttattgcttataataacatatatttttaaaaaaatcaaaacattggtacaaattgtatatataggaattaatttatgaaaacgctttacacataaaagtcaatggtatataataaattcgtaccaaagaattgtcaactgttttaaaaatgtcaaagtgtcaaaaaaaataatgaagaaagggaatgttatgaagaagttaattgttggtatgttatcagcatttatggcattgtctacagcgatgacgccagtaagtgctagtaacgatgtagaaaagaaagttacatctctaatgtcaactatgacattagaacaaaaggttggacaaatgttgcaacctgataccagaagtattacacctgaacaagttaaagaatacttcattggttcaattttgagcggggggggcaggtccctcaactggaaatactgcaaaggattgggcagatagactagatgaatttcaaaaagctgccattgatggatttggtattcctttgttgtatggtgtagatgcagtgcatggaaataacaatgttgaggatgcaactgtttatccacacaacataggtttaggtcaagcaaatgatgctgaacttatgaaaaaaattgggaaagcaacagcccaagaagtgagagcaattggagcaaactgggcatttaccccaacgcttggattgcctcaaaatgaaagatggggacgtacatatgaatgtttcagtgaaacatctgaaatttcatcaaaattaggtgcggccttaatcgaaggaatgcaaggtgatttatcttcacaatatgcgattgcaacagcaaaacattatattggtgaaggtattgcaaaaaatggtatcaatcaaggtgatattgatggaaagctatttgagaaagaattagaggaattactaattccatatcgtaaagctattgcaagtggagttaagagtgtaatggtcacttacagtagtattgatggagtaaagtgccatgaaaataaaaatttaataacagatatcttaaagggagatttaggttttaaaggtattgttattactgattacaatggtacagatcaagtaagtggaagtacttataaagaaaaaattgaaaaaactatcaatgcagggatggatatgttaatgattgatggtaatgaaggtaatactccaaaatggcttcttgcaagagataacattatgaaatcagtagaagaaaagaaaatttcattggaacgtattgatgatgcagtcagacgtattttaacagtaaaatgcgaattagggctactagatgatgtgaaattagcttatgctgatcaagaattacttgcacagtttggtagtgatgaacatcgtcaaattgctcgtgaagcagtaagaaaatctttgacacttttaaaaaacagtgaaacacaaaacggatcaactttaatggctgatttgaaaaacatgaaaaagattatcgtagctggagaaactggagatgatattggtttacaatgtggtggttggacaatttcttggcaaggttctaaaggtaaaattactaaaggaacaacaatttattctggattacgtgaattagctggtaaagacaaaacaatcgactataatgctaatggttattttgaagaagatgattatgaagctgcaattgtcgtagtaggagaaagaccatatgctgaaagcaatggagatagatcagctagagatttaactattgatgctgatgatattaaagctattaatagaattaagcaacagcatccagatttacctattattgctgtattggttactggacgtcctattacaattgttgatcaagttgatgatttagatgcaattgtcatggctggtttccctgggactgaaggggctggggttgctgatgtattattaggagattatgattttactggtcatttaacaatgacttggccttggtatgcacaagatattgaaaagaaattaacagatgaaacaaaagtcatgtttgaatatggtagaggattaacaaaaaatcagacaactgcaattgctaatcctaaacctaatgatccttcagttattgacttatcaaaaacaggcggaattgttcaagcggaagatttctattcaaaacatagtaagattgtcttagaaaataacaatacatctattggttatttctggaatggttatgatattagttataatgtcatcgttcctaaaaaagctcgttatactttaaatgttgcagctgcaactcaaaataatggtgtgaaagcagcatttgatgtttatgttgataatgttttatattacagtacatctacgccagcactaaatactggtggatgggcaagctttgaagaacaagaaatgaatgataaaatttcattgcctgatggaaaacatattattaaatttgtttctcaaacaaaagatttaaatattgactactttaaattcattgaatttgatgatgaatatcaagaaccagaaatcaaacctgatgtacctaatgaaggatcaggggcaatgattaaagaagatgctgttaaagtgacaatgtcatcatcagataattctggtagtatgacttggtatgctggaaatcaagaaataacaaatcgtaatactgaaaaagcagcattagatattcgtaatgctgatgattcaaaaatgacaacaattactgttgatgaagataaaacatatcaatcagtattaggtatgggaacttcagtagaagaatcaactgttaataacttaatgaaaatggatgatgcttcaagacgtaaatttattaaacgattagttgatccagttaatggtatgggaaatacattattcagattgacaattggtactgctgactttactggacgtccattctatacatattatgatggaacaggtaaagaattagatggtcaacctgactgggaaaataagacaggacatggatttagtatcgaaaaagataaacaatatggtattatttctgtcattaaagaaattcaagaaatcgctaaagaatgtggtgtagaaaaagatcttaaattctttgcttcatcatggacacctccaggatggatgaaagttgctacatcttcaagtcaatcatgtgaaaataatgaattgttattaaaaggtggaaaacttaatgatgtatatattgatgaattaggtaaatattatgttcgtttcatcgaagaatatcaaaaagcaggtattcctatttatgcaatgacattacaaaatgaacctttattagaaattgattatccaagctgttatattacaggtggtcaagaagcgaaacttgccaaagcaattaaacaagaacttgcaaagagtaaagttctaaatgatcaagaaaaagatgtgaaagtatgggcatttgatcataactttgatggtgctcaagcttatgttgcagatttatttgcaacagctgatggacgtgaaaatgttgatggtattgctttccatccatatggtggaagtccttcaacaatgggatctttatatgatcaatataaagaagattatacaatgcatttaactgaacgttcagtttggggtgcaagtggagtcagcgatattattagctggtttagaaatggttctgaaagttataatgcatgggtaactatgctcgatagtaaaattgctcctcatcaatgggtaggtacaccagatccaacattatttgtccaagatgcatataatcgtaataaatattgggcaacaccagaagtttatttaattggacaattaacaaaatatgttcgtcctggatttgttcgtattgcttcaagtagcggaagtacttcatcagttacaaatgttgcattcaaagatccagaaactggtaagattgttatggttgttgctaactcaacaggaagtaagcaagaatttaaagttgttaataatggaacacaatttaatgccactttacctgctggaaatgttgcaacttatatttgggatccagttgatggtgaaagttataaaaatattactgatgatttaacattggatgatgctctccttgaaggaaagggagaaattgaaaatggtgaattaggtcatattgattcaactacaaaattaaattacacagttaatgtcaaacaaccaggtacttataaagtagaattagatgttgcagttggtggtgaggaaggtaagaatttcccagtcgtcatttcacaaaatgataaagttttaggaactgcacatactcgtcgctattggttatggggaggagaatggaataggtattctaagattcaaacatatgttactttagaagaagcaggattacaaaatatttcaattactttccctgaagctggtatgaactttaagaaagttcaatttacccttgctgatgctgtacaatctattcctggaaaattagatacaacaaattattttgataaaaatggtatggttttagaagcaggaaagattcctaattttggattctctcagttagattactatttagattataagattaatgttcaagaatcaggaaactataattttgacttcgaaattgctacaaaagatgataaagctggggcttggattgatcttttaaatcctgatggcagcaagaataagtatttaggtgaaattaactttgaaaatacaaaagatactgatacttatgcacataatacaaaagcttttgatttagaagctggagaatatacgattcgtattaagttcaaatctggtgatactaactttagaaatgttgttattggacaagcaatctcattagattatgaagaattaaaagaaggtgcattgaataataaagaattgattgttaaattaagtggtgcatcatttaatgcaaaccttactaaagaaaactggtcacttgatttgccagaaggtttaaatttcaaattagaaagagtcaatgattcaacagttaagattattttaactggtgaagcaactcaagactttgatactgatttaaaagtattattaaatgtagatgcaaaagaatttaatggattagaaggaacttcattagttcaatatgttaatattaaggctgttgatgatgaagaagttcttgttgcattagatgaagttgaatttaatagcgaaacattaaatttaacaattaagggtggtacatttaaagatgatgttgcaaaacatttaacattaacaggtgatgctgctcaatatgtaagtattaaagaagtaaaacaaatttctcatacagaattacaagttcaacttgtatggaaaccaatgtatgatcattataaaggaacaatcagtataacaagtgatggttatagtgatggaactttaagtttagaaaaagaaataacatttaaagcaactgatcaattaccaacagcaattgaagttggaccaatcaattcagtttcattagctgaaaacttagcatatcgtcaaaaaggaagtcttgctaaaaatccagcgaaaggaaattatgttgatttcttcttagatgtgaaagaagctggacaatatacaatttcttattcagttgcaaatagtgaagctgtagttaatggattaaaactaagtggtggagctcttttagcaactgataatattggtagtgtttcatttaataagttctggggtaatgctttaggttatgtacaaacattaactttaaaagcaggtcaacaaactttacgttttgaaatgaataactatagtgatggattcaagattgaaaacattaaaattgcagctacaaaagcacctactgaaatcaataaaaagacaacaatctctgtagatcaattatatgatggatctaagacaaaaggttggggtattgaagtaaaggataagatttcaaatattggatgctctgaagcaggatcttatcaagattacttagtagatgttaaagaagatggatattataactttagtattaaggccgcacgtagtagttcaacaagcgttaacgctattttacaacaagtcactgataaagtgacagacctaggaattgtaagtattgcaaatactggagactggggtaaatttgtagatagtgaatcaacaatggttaaactattagctggtcaacaaattttacgtgtatatgatgatggtgatggatttaactatcgttcatttacattagattatgttaaggatattgataaagaagcaccagttattactggtaaagatgttattgtttatgcaggaagtgatatttcagctactgatgcaattgctctagcaattgaagataatgttgatggaacaattgatatcaacagtgaacttgttaatattgaaacaacatttgattctcataaagttggagaatacaaagttgttgtgactgcatatgatgtagaaggtaataagagtgaaaaaacatttacaattacagttgtttcaccagctacaattgaatattcaaatgatccaatgaaagtgggagatgaatttgatccatttgaaaatgtacgtattttagatgtagatggtaaagatattacttctaaagctgaagtgatttctaataatgttaatgtagatgaagttggagaatatgaagttgtttatcaagttgttgataaatacggtacaaagacaacattaactcgtattgttaaggttgaaaaagctgatacaccagatacacctgacaatcctgatacacctgataatcctgatacacctgataatccagatactcctgacaaaccagatattaatgtcaaaccagatgaaccaacaaatcctgatactccttcagttgatgttacacctggtacacctgatcaatctgttgttgtaactgaagatacaacaaacatgaattattatttagttgcaggatgtattgcattattggctattgttgtggtatctaaaaaaagaaaatctcgtaaggcttaataattaaaaaatagtttcatatttgtaaagacttggttaaatgccaagtcttttttgtaaaataaaagattgatttaatcatcaatcttctttgtataattcttataaaattctactaatcgcttcattgcttcacttaataaagcatagcttgttgctgtattaatacgaataaaaccatcataatgacttaagaatcgcgaacctgtttctactaaaacatgagtttcttttgctaagtctaatacaaattggtcaacattttcaatgtgagggagatagacccaaacaagatatccacaatcaggttccataacttttaattccgcttgttctaatgttttaattaccatattaacattaattctaatataatcaattaattcatgataccattcttcaccatatgtataaaccaactcaatcatagatattcctacacgattacaaccaatatgaagatgatttaaataatcaatatattgttgctttaaaatagggcttgcacataacatataggaagttgataaacctgatatattaaaagttttattaggagaagctgaaaccatgatctgatcatattgatgactgaattcaatcattgaaataaaatcttgatttgttaaattaaaatcactatgaatttcatctactaaaataatcacctgataaagtttacacaaatcaacaagttgttgtaattcatcttgactccacattctgccaccaggattatgaggatgacataacatcaaaacacgaacatgatgtgtttttaaaatctgttcaagattttcaaaatcaatataataacgattattttgataaattaaaggtaaagaaattgtttttccaacacgactacaattttgaaatggtccataaacaggtggcataatgataatttcttgatttctagctagcatatcacaagctaggtttaatgatgtaattgtaccaattgaaggaataatccaatctttagaaattgttatatgatgaatatggtcataccaatttacaatactttcataaaaagaatcttgaatgtgaaaataacctagatctggctgggcatataactttaacatctctttttttattttctcatcaagtgcataatccatatcagctataaataatgggaatatttcagtatcatgatttacttctatttgaaatcttttttgaatataagcatcttcccatttcattgatccattgtttcttctttgtaaaatttgatcaaatttttgattcatttttatcactccttgactaagttcattataacatagctgattcatttcatcactataatatgacttttgaggataaaacttaaaaactacacatttttataaaaaagtagtaaaatagaattaagatgaaaagacaaggagatgttattatgaataattttggtgaagatttaagaaagcttgtgttagctggacttggtgcagttgcagtaacagctgaaaaatctaaagatgttgttgatcagttggttaaaaaaggtgaattgactgtagaacaaggaaaagttttgaatgaagaattgaaacataatgtggcagaaaaattaagagaaccagtaagtacggaaacaattagtaaagatcttgaaaaaatggatgtagaagatttagaaaaactaaaagctaagattgaagaattacaaaatattaagaatgagtcagaataatcaaaaaactttaagtagtcaaagaaggcttgttcaaattattacaatattaaagaaacatcatttagccaaaggaatagatcctgttaagtttagaatgattttagaggatttaggaccaacatttgttaagattggtcaaattatggcttcacgccaagatatgttttcacaacgttattgtcttgaattggttaaattaagagataatgttgctgcaatggatattgaaacagtaagagaagttattgaagatgagtatggaaaaaaattatctgatgtttttgaggattttgatgagaaacctttaggaagtgcttcgattgctcaggttcataaggcaagattaaaagaagatggcagagatattgttgtgaaagttcagcgtccgcatatttatgagatgatggaaagagatattgcccttgtgagaaaagctattaagttgttgaagttaaatgaagttttaggcagtgttgttgatttgaatatagttttagatgaattttggcatactgccaaagaagaaatggattttctcaatgaagcacaatttgcaagaaagtttgcaaaacttaatgcagatatttgttatattggggcaccagttatagaaacggcttttagtacacacaaggttttggttatggagtatattgatggttttgatattgataatcttatcaaactgaaagaaaatggttatgatgttgaagaaattgctgctaagttagcagaaaattatattaagcaaattgttgatgatggtttctttcatgctgatcctcatccagggaatttaagaataagagatggaaagattatttggattgattttgggatgatgggagttttaagtcataatgacaagaacttaatgaaaactgcagttatggcaattggaaagaatgatacacaaaagttggtcgatgttattttgactctaggagaacatgatgggcgtattaattatacgttattctatgatcatattgaaacgttcatgagtcattatgtgagtgctgatttaaaagatattaacttaggtgatgtggttcaagaaatctttacaattgctcataagcatcgtatttctatgcctaaaggggttagtatgttagcccgtggattagtgacaattgaaagtactgtcatgttgatagatccacatattagtattattgaaatagcagctaatcatgttacaaatcatatggctaatcattttgatttaaaaaaagagttaacgaactcagtgcaaaagctttataattctagtcaaaattttttagaattacctattcaattatctgatattatgagaatgatgatgaaaggacgcttaaagatcaatttagatattgtagaatcaagtgtaccacttatctcaatcaatcatatggttaataaattggttgttggaattgtaagtgcaggattattaatggcaagcagtttgttatgtacaacccagatgacacctaaagtttttgggattccagcacttggttttattggttatatgacagctgttggattaggaatttggttgttattgacggtattgaaagaaaaaaagaagaaaaagtaaaaaatatattgacaacgcttacactataagctaatatatgcttgtagttatagtttgtaactcaaactcttttgaggcttatctataagacagtaatgttttttaggtgcctagaaagagtttttttgtatgttataaaggagggaatcatttgaaagttatcaaaaatatcaataataatatttctatttgtattgatgataatggccgagaattgattgcgtttggaaaaggaattggttttattaaaccaccttatgaaatttcattaagtcaaatcaatcgtacattttataatgttaaagattttgattatggaattttaaaagaaatacctactgaagttattaacgtagctattcgtattattgaccatgcaagcgttaccttagatacagtatttaaagcatcaacaattctcgctttagcagatcatattcattttgctataaaaagaaaagatttacatatatcgttagatacacctatgtttgaagatatgaggcaattatatccttgtgaagttaaagaggcagattatgcatttcaaatcattaataaagaattgaaatgtgatttgcctaagagtgagataccaacattagcacttcatcttattaatggaaaatcattgacagaaaaggatgttcgatttgatagctcacagattattgatgaagcaattgatattattgaaaatcatttttctataacaatagatcgaaataattttaattgttcacgatttgtcactcattttgattatcttatcagacgttgcttaaataatgaacaaattactagtaagaatatcaatatatataaattaacaatagataaatatgaaaatgtatataaggttgcaatgaaaataggaagattattgagaataaagttaaatataacattaacagatgaagaaatcctttatttgattttacacataaatcgtttgtgtgttcgagaagaaaataaatagagaggaaacagactatgaaaaaggattatggaaaaatagctgatcaaattattaaattggtcggtggcaaagaaaatatttcaaatgttatgcattgttatacaagattacgtttaaatttaaaagatactagtattgtaaatcttgatgaaataaaaaaactagatgttctaggtgctcaatatgcaggtgaacaattacaaattattattggaaatgaagttaaggatgtgtatgaagaagtttgccaaaaggctgaaattgcactaactgaaatgattgatgaagaaattaatgaaaatgtcaatgagaaaaaagaatttaatattaaaaatatatttaataatattattgatgttattgttggttgtattattcctatcttgccaattcttattggttctggaattattaaggcagttatattaattgcccaacaagcaggttggttagctgctgcttcaccaacagctattacattaggttttgttgctgactctgctttctattttatgccagtctttgttggtttttttgcagcaaaaaaatttggtgctaatttagctttaggagcaatgattggggcagctttgttacatcctacttttacgactatggtaacaaatcaggaggctatgagtgtatttggattaccaatttatcctgcaagttatagcagtacaattattcctgttatattatctgtatggattatgagttatgttgaaaaattaatttcaaaatattcgccaaagtctattcgtacaattttagagcctactcttacattattaattatgacaccattaacattatgtgcaatcgcaccattaggagtaatgttttcaagtggtttaggaaatttatttgaaacattttacaatgttttaggtccaattgctgtagctgtattgtgttcaattatgccgtttgttgtcatggttggaatgcatgttggagttattccaatctctattcaagcaattgcttcaactggatttgataaatttataatgcctactttctttatgtctaactttgcgcaaggtgctgcatgtttaggtgttggagttaaatcaaaacaggctgatttaaaatcatttgctttttcttcagcattttcaagtattgtacctggaattagtgaaccagggatgtatggaataacgttaaaatacaaaactccaatgtgggcagcaatgtctggagcatttgttggtgggctatattttggatttatgggtgttggacaaaacgcttttgttccaccaaatatctttgctattacaacatatatgttttcaacaaataatttgattcataccattattggtattgctattgcaatgattgtcacatttgttatgacaatgattatttataaagaaaaacctgagtagatttactgctcttaaaaatagaggtgagagtatgtttaatgtttttaagaaaaaagaagatgaagttaatatatatgctcctgtaaaaggagaatttgtaactttagaaaatgtaccagatcccattttttcagaaaaattaatgggtgaaggttttgctgttattccatatgataatgttatctgtgctccttgtagtggaaaattatcaatgattgctgatactttacatgcttttgggattacaatgaaggatggcagtgaattacttgtccatattggattagatacagttgggttgaagggaaaatattttcgtgctttaaaaaaagcgggtgaagatgttaaacatggagaaccagttattcttgttgatgttgatgagataaaaaaaacacttaatcctattacaatggttattatgacaaataatgattcatatacaacattggataataagataaaagtaaatacttcaaatataatgatgagtttaaaagattaataagaggaggttgaaatcatgggatttccaaaaaattttttatggggtggagcaacagcttctactcaaattgaaggagcttataatgaaggtggcaaaggaatgtctactttggattatgttacatataaaacaaaagaagaaagaaatgatgatatttcttcgatggatgtaacttatgatcaatatctatcatatctaaaaaatgatgagggtattaattttcctaagagaaggggaattgatttttatcatcactacaaagaagatattaaattatttgctgaaatggggtataaagtttttagactatctataagttggccaagaatttatccaacaggattggaagatgaaccaaatgaagaaggattaaaattttatgatgatgtttttgatgaatgtcataaatatggtattgaaccattagtaacaatgattcattatgaaattccagtaacattagctgataagtataatggttgggaaagtagaaaattaatagatttgtttgaaaagtatgtgaaaaccattgtggatagatataaaaataaagttaagtattggattacatttaatgaaatcaatatgatgcaagcaagtgcttatacaggaggtggattattcctagaaagaagtccattagataagttgaactgtgaattccaagctttgcatcatcaattcattgcaagttctaaagcaatggcttatgttcatgaagtctctccagaggcaatggttggatgtatgattaatcgtcaagaagtttatcctgaaacttgtaatcctgatgatgttctctgtgctttaaaagatgatcaatttaatttattctttatggatgttatggctcgtggtggttatccaagttttatgaatagatattttagagaaaataatattcatattcaaatggaagaaggagataaggaattattagcaaaacatactgctgattttgtggcatttagttattatatgagttttgttgcaagtgcagatcctagtaaagcacaggttttaggaagttttatccgtccactgaaaaatccatatttaaaaatttctgaatggggttggccagttgatcctgttggattaagaattacattagaaaaaatttatgatcgttatcaaaaaccaatatttgttgttgaaaatggtttaggtgcaaaagatgtattagaagatggcaaagttcatgattcatatcgaattgattatcttcgccaacatattactgcaatgaaagaagcagttgaagatggtgttgatttattaggctacacaagctggggatgtattgatttggtaagtgcaggaacttctgaaatgagtaaacgttatggttatatctatgttgatttagatgatcaaggaaatggaactggagaaagaattagaaaagactcattttactggtataaaaaagttatcgcttcaaatggtgagaatttagagtaattctttaaaagtttaaaaaaattaaaaaatatattgacaaatgacaaaaaatcattagaatatatattgttcatattaaccgtatgggcgtgcaaaccgcaatgagtaggtatggctataatatctactctcctttttttattatagtaaaggattagcttacttatttaaaagtgaggctaatccttttttgttgataattgaaatttttttataggctattttaatatatccttttttggcaaattcattaagaacttttgtcactgtaactctagataatcctagtagagaagctaattcttcatgggtataaggaattgtatgattaatttgttgttcttgttctaaaagaaaagaggcaactttttcataacgattataagtgtaagcacgtttaaccatagctgaaagataatcacatgtttgagacatcatttgtaataatgaaattgttaattcattggattctttaagataaggaaataagtcattgagatgacaagcaattaattcaacttcattaattgcttctacacttgttggtcgtgatgagttttgaataaatgaagattcaccaaaaatacgacctctatcaatgatttctaaagtcacttcctcaccactggatgtcatcacataaactctgactcgtcctcttaaaataagatagagactgtttgcatcatcttcttgcatataaatgatatcatgaggatgatatatgacttttgtacctgcttgttcaaaataatgaaataaattctctttaattttcataaattcaccactttctgctttaattgtaacatagattacaatcttaaaaaagaagatatgataaagtcttgaccgaggtgaggcatatgaaacaaaaattattacatttggtttatattgtagtgggaaatatcttaattgcttttgctttaagtacattattattagaaaatcatattattgctggaggggtttctggaattggaattgttttaaatcattattttggtttatctatttcaatgagtgttggtttgattaatgttgttctttttttactaggacttcttttcttgggaaaagtctttgccatgacaacattggtttctacattcttatttccaatggttttacaattttttgaaagtcaaagtatgttccatcattatttaaatgatcctttgcttgcttgtattattgcaggatgtttaattggagtaggaattggttttgttttaaaagctaatgcttctactggtggagttgatattttagctattttattgaataaaaagtttggattacctgttcatattgtattgaattgtattgatttaagtgttttggttttacaaatttcatttaatgatccaacacatgtcatttatggaattgttactgttatgattactgctgttatgttaaataaaacactatcatcaggaacaagcttaatgcagcttgttgttatgagtgatcattatgaagaaatcaaaaatatgattttacatactcatgatgcaggagttacactcttggcaagtgagaaaggttatacaaaagaatcttctaaaattgttttatcaattttaccttatcgtaaattaccagttattaaagaaatgattaatcaaattgatcctttagcttttatgattgtttcacatgttgatgaagttgggggaaaagggttcactttagaaaagagaaattaatcaagggatttttaaaaatcccttttttcgcccataccaaaatataatcataacatatcttatcttgaggtgaataaatgaatggaaccctatgaagaagatatgtatcagccaatgaattctatggaaaggcaagggattatcgtcccaccttggttttggtggtttttcttcccaccattcccaccacgtcctccatttccaggaccgggacctagaccgccatttccaccaggaccaccacgtccgccatttccagggcctagaccaccattcccaccgggaccaccacgtcctccaggaccagggcctagaccaccgtttccaggaccaatgcctagaaatgatgaagacactacttattaagtagtgccttcttttgttttctttcaatttttttatattctatagttgctacaacgatagcaccggctaaatccaacattaaatccttcatagtgtcatctaaagcagcatgcccctgtaaaggaatatcatcttcatcatagagtgttgcacgggttgattgcatatattgctgattattggtatggaaaatatcatcaaccgtgtattcaccaatttcccagacagcccctatagctaaagctacactcacaacaataacactcataaataaaggtgagacagataagggaatagtgtattctttatctaaatactcaatcacaataaatccaacataggcaatgacaattccagagaaagtatgcaagattgaatcccaatatggaatcttcccataaaaatttaaaacatcacctaaaataaaaccactaaaagcaaaagtaattaagacaaagtctaaaagattaggaatggtaaaatgatatttatcttgaataaactttggaatacgtaaaacaaataacattgcaattaattgtaccattgtaaaaattaatcgccctttatttgcattctttcttgtcaataacaagaaaactgcaatcaataacataagcatgacaagccaaaaaataatctttcttgcaataatcagataatacggtttcttttctttgaatttttctttcatatttgacctccttctcatttagacaatcaatatatgtctatgattgtaatacaatttgccaagaaagtaaaagtttttctaaagaatatgtcgcattagctggagaagtagaaggtaagcagatatcttctagctgtgttatttctagacaatatttttgataaagctgatgagctttttgtccatttgtataaattttatgaatatgactttcatttattaatttttgaatatcattgattttcacatctttaatactactatcacttgatcctttgatctcacaactttcaatcacatcccataaagcaatatgatgttctaataaaaaagcttttttatcttcaattgtttctagtttttctacttgatataaattctctaaaacgcgccaaaaacgattttgtgggtggtgatagaaaaattgcgcttgtcgtgatttaactgaaggaaatgatcctaaaattaaaatacgagagtcctggttataaactggtgtaatattatggatttcactcataaaactcactccttttcacaaattttaacatataaatttacaaaatgatagaaaaggtatatgataatagtgcagatagtgtttatcattgacctgtttcacaattaaatagcgtctttgtggcagggtgtaagtccctaccgatggtaaaagtccatgacccgcaattgcggctgatctggtgtaattccagaaccgacggtatagtccggatgagaaaagacataatctgtgcacacctagacaattttttgtataggttattttttttagaaagaaggagacagagtatgaaaaacatgaaagttaaagaaatgacaacacttggaattttatgtgcttttgctattgtgattaatttattagccatttttccacttgttccagccgttccttggttaacctatgatcccaaggacattatcattgtgattgggggatttatctatggtccatttgcttcatttatgatgagtgccatttgttcaatcattgaaattgtgattaaaggtggaactgttcttgatgttttaatggatgtcattgcaacttgttcatttgcctgtgtagcagcggctatttacaaaaagaaacatacaaaacaaggggcaatgttggctttgggtgctggtgttatttgtatgacgattgctatggtattttggaattatattgtcacaccaatttattatggtatgccaagggaagccgttgttgctttattgcttccaggaattattccttttaatcttttaaaagcaggattaaatgctggggtgactttatttctttataagagtattgtgactattttaagaagtacaaacttggttgaaagacatgatgatcaggcatatcaaaagaactcatatttaattattgttggtttttttatcattataacaagtttatgtattattttagcaatgcagggaattatctaggaggaaaagaaaatggaatttcaagaagcaaaagatttattatttcaaaaattagcaccatctaaaattatggcattagcttcaagtgttaatgattatgtgatggtgagaaatgtaagttgtttaatttataatgaggctatttattttaagacagataagaattttagaaagacaaaacaactttatgaaaatcctcatgttgctttatgtgttggtgggattcaagtagaaggtcttgcaacaattaaaggcttggttattgatgaacctggtcgtcaatttgaaaaactttatcaaaagtatttatggggaagttataatgcttatagtcatgaagaagatgagattttagtggaagttaaaccaacatttgttgaattatgggatacagatgaaaagaataaagcctatcaaatcttcattcattttgatagtgaaacagttgaatatgttccttatgatgagtaaaatagaaatattttactcttttttgtttgtcttttgtttttacttgtcaaatataaaaaaacaatgtacaattgagatgtttttatagaagggatggagagaaatgttagaaaaaatctttaagctccaagaaaaaggaacaacagttaaaactgagattttagctggggttacaacattcttggcaatggcatatattttagcagttaacccagcgatgttaggggaaactggtatgagtgtgcaaggggtctttttagccacagcgattagtagtgcagttgctactattattatggggttaattgctaattatccagtagctttatctgctgggatgggggttaatgctttatttacttatacaatttgtggaacaatgggattaagttataagggagcattggcttgtgtttttgtttctggaattatttttgttgtgatttcagtgactggattaagaagaatgattattaatgcgattcctgcgcaattgaaattagctattggtgcgggtattggattctttattgcttttattggtttaaagaatgctgggattattattgctagtccagcaacatttgtaagcttgggtgattttactcaaccagctgttattttagcgatctttggaatcttggttacaattttattgttatcgcgtaaagtgcctgctgcagttttctatggtttattagtaaccgctgtagctggaattattgctggattatgtgggattaaaggtatgccaacattacctaatgcagttgtttcagctgaatttgattttagcttagtaggtgtttttgcttcaggaatggatgaattattatctcatccaagttgttttgttgctattttctcattattatttgttgatttctttgatactgcaggaactttagttgctgtagcaaatcgtgctaatttaattgatgataaaggggaattagaaaatgttgaaagagctttattagctgattcaattggaactgtttttggttctgttatgggaacttctacagttacttcatttgttgaatctacttctggtgtagaagttggaggaagaactggtttaacagctttaactacaggtattttattcttattatctgttttcttctcaccattattagcagcagttacaagtgctgttacagctccagcattagttgttgttggtattttaatggctcaacaattaaaaggaattgattgggataactttgtttatgctgctagtggatttatgacagtcttatttatgattttagcttattctatttctgatgggattgcaattggatttattacttatgctttaacaatggtaggtgtaggaaaagctaaagaagttaagccaattgtttgggtattggttgtattctttgttattttcttggtattcttacctaaataatgaataaaaatgatgaatcgatgattcatcatttttatttacaactttttcatcaaaagttcataacttgtttctataatagaattgcatcaacgaataaattttatttgtaattatataaagagcgtgtataataagattactatacgtacgagaaaagaggaatgaaatgaaaacttttatgaataagattctttcaagaaggttattattgattttgacccttcttgcaactatattttttagttttgtcacttttgaactcaatgttttacctttgaaatattatattccaatggttgttatattattactatttactttattgctttattttatagaaaaagataaaaatgataaccatccaattaaagttgctttttttaagttagtgaatattattttagcagttgctttggtttttggttcactttcaattttaaaaggctcagattttttagcgagtattacaaatggaggggttcaaagtgttgaaatagatgtagctgtattaaaatcatctagttatgataaacttgcttcattaaaaggaaaaagctttggtgctaatacaagtatgggagctttggatattaataaatctgaaacaatcattgaggatgagattggtgatattaaagttacaagctataaaacaaataatgaagtgattaatgctttaaagaatcatgaaattgaagctatgattgttaaagaggttgaacttgattctttaaatgatattgaaaaagattttactgatcaaattaggattattaaaaagattcaaattaagaaaccacgtattaatgctaatagtgcgaaggtaactaaagagccattccatattttaattagtggaactgataagtcaggacctattgatacatttgcattatctgatgttaatatgattgcgactatcaatccaacaacaaaacaagttttattaacaagtattccaagagattattttgttgatattgttgggatggatggtgtcagtggaaaagataagttaacacatagtgctaagggtggcatgaattgtactatggatacgattgaaaactttatgggaattgattttaactattatgctaaatttaattttacatcatttataaatgttgttgatgcattaggtggaattacggttaaagttcctaaatatcgtgtaatcggtagggatgatggtgtttttgttacaaagaaaggacattatacaattaaacctggggttaatcattttaatgcaaaacaagctttatcttttgtaagagaaagaaaagcttttgtagaaggtgatgcaatccgtggtaaaaatcaaatgttaatgttaaaagcgattttaaagaaatgttgttcagcaagtattattacaaagatggataaagtttttgaatcattatcaagtagttttgaaacaaatatgtctgctcaggagattaagtctttaattaatatgcagattgatgatatggcttcttgggatgttcaaacttatcatttggatggtgatgcttcaaaacgtacaagtcaattagcaacggttggagatgttacaaagtttaataaagatggtgtttttattactttgcctgatcaacaatctattgataaagctaaagaatatattcaattagttatgaaaaatgaaattgtaaaagtagaagaagattaagtgtttattcttgacaaaagaaaaagagttttatagaataagcttaaatacagtgaaaagaaagagtaaatgataaagacaagcgtagagagttcttggttggtgaaaaagaatcttggattgtcattgaatacatcttggagtaggtggctgaatcaagtaggctaacacgggaacgcccgttatagtgttagagtatgttggtactcgatgaggttgttatagtgatataacaataaattaaggtggtaacgcgatggtctctctcgtccttatgggatggagggactttttttataggaggtaatgaaaatgattattgtatttaaaccaaaagcaaaggatgaagatttaaaaagagttgttgataaagttgaaagattaggattaacagcacatgtttctaaaggggaagaaacaacgattgttggattagtaggagatacaacacgagttgatccaaagcaaattgaagttgatgaagccgtagagaaagttatgcatgtcagtgaaccatacaagcttgctaaccgtgctttccatcctgatgattctattattgatgtttcaggagtaaaggttggaggagatcatttagccttgattgctggtccttgttcagttgagtctaaggaacaagtgattgagattgctaaagccgccaaagccgccggagcaaatatgttaagagggggagctttcaagcctagaacttcaccatatgctttccaaggtatgggaacagaaggattggatattttggtggcagctaaaaaagaaacagggctaccaatcgtatcagaattaatgagtgcagattatattgaagaatttaatgaaaaggttgatcttgttcaaattggggcaagaaacatgcaaaactttgatttattaaaagaagttggaaaacgttgtacaaaaccagtgttattaaaaagaggattaagttcaacatatgaagaatggatcatgagtgctgaatatatcatggcaagtggaaatccaaatgtcattttatgtgaaagaggtgtgagaacatttgaatcatatacaagaaacacattggatttacaagcgataccagtgattaagaaattaacccatttaccaatcattattgatccatcacatgccggaggaaaatggtggttagtcgaaccgatggcaaaggccgctgtagcagcaggatgtgatggtttgatgatagaagtgcataataatccagaatgtgcattatgtgatggaccacaatcattgaaaccaaagaaatatacagaattaattgaacaaattagagaaattggacatattgttggaaaagaagtatagtgtggatggactttaacaaagttgttgaagtcttttcctattgactttttgagagaaatacatcataataaatgcaagtaaacacttgcggagggaatatggataaaacaagacaaaagattattgatgcaacgatgaatttaattatggaaaaaggctatgcttcaatgacaactaaagatattgctaaatctgctcaggttaatgaaagtacattatttagaaagtttaagaataaaaaagatattgttttatgtgctatggaggaaaattggcatccacatctttcatctgatgatttttatccaataagtggtgatttatatcatgatctttgtcattttgcatgcgtttatatgagtaaagtgacaccgcaatttgttaaaatatccataggacttagaagccctgaactgtttgatgatacagctgaaggtattatgaaagttccacaagtttttaaggaagtattgatacaatattttcttgaaatgcagaaattagataaaataattcaaactgatattgaatctttagctgttgcttttttatctatgatgtttggttttgtttttttgaaggcttcttttgataatcatttaatgacggtgagtcaggaatcttatataaaaaatagtgttgctgtttttgttaaagggattgaaaaagtatgacattgatatgtcatttcttttttaaataaatatgcaagtaaacacttgcgaaggaggcgtgttatgagttgttattttttagttcagattttttgtactgatcaacaaaagcgtagtttatatgatgaatatattcatgatgtaaaacccatcgttgaaagttatggaggagagtatcttataagaagtgatgatgttgtatcgttgagtcaagattggaaacctgatagagtgattctcattcgtttttcaaatcgggaaaagttagatgaatgctttcattctcaagcgtatttaaatatgtcttataaacgtgaaatgagtgtcgagagtcatgccatcattataggagggtatgaagatggagatatgtaaaggtgttcatcaattgaaaattaattttcatgtgacaccagatattgaaagatatgtttatgtttatattttaactggacaatattgttatttgattgatacaggtgttcatgatagtgaaaagatgattgaagattatatttgtgaattaggatataaaatagaagatattcgtggtatttttctaactcatgcgcatcctgatcatatgggaggtgcttttgctttacaaaagaaaagtggatgtccaatttatgcaagtataagggaaaaagattggatagagaatattcatcaacaatttattgaaagacctattcctaattttgataaattattgcagaactcggttattgttgataaaattattgacaaggatatagaaatagaattggaagattgtttatcaatgaaaattctttcaactccaggtcattcatcaggttcgctctcttatttggttaatcagaaaatattgtttagcggtgatgctattttggttaagggagatattcctatatatacaaatgtcaaagaaagtatagattcgttaaataaagtattatcattgcaattggttgaatattattgtcctgcttgggattgtgtttatgatgcatcgacaggtaggagaaaaatacgtgaagctatagctgtgattgattctattcaagaatgtgttgaaatggtgatgaaagattttcctgatgcatgtgatgatttttttttgaaattgttagtcaaaggatggatatggtctctttttggcaaaatccattatttaaaaagatgattttaagtcatattgattataaaaatgaataaattgattttagattatttgtaaataaatagaaaatatttacattttaggtaaaaagcattgacaaatgataagatatcgcatagaatactatcaacaaactactgatataaatacagtgaaaagaaagagtagattattgaacaagcgtagagaattcttggttggtgaaaaagaatgttggaatataattgaattcatcttggagtagacggctgaataaagtaggcttagtccgggaatgcccgttatcgcatcagagtatgaacctaacaataggcgtacttatgaaggtttctatagtgatatagaaataaactaaggtggtaacacgaaagatctatctctcgtccttatggatgggagatttttatttatacagtagggatatgaaaaggagatagagattatgattattgtatttaaaccaaaaacaagtgaagaagatgtgaagaaagtatcttcacaaattgaagccaaaggattaacaacacatattgttgtaggggaagatgtaacaatctgtggtatcattggggatacaacaattgttgatccaaaacaaattgaagtgtcaccagttgttgaaagagttatgcatgtcagtgaaccatacaagcttgctaaccgtgctttccatcctgatgattctattattgatgtttcaggagtaaaggttggaggagaccatttagccttgattgctggtccttgttcagttgaatctaaggaacaagtgattgagatcgctaaagccgccaaagccgctggcgcaaatatgttaagagggggagctttcaagcctagaacttcaccatatgctttccaaggtatgggaacagaaggattggatattttggtggcagctaaaaaagaaacggggttaccaattgtatcagaattaatgagtgcagattatattgaagaatttaatgaaaaggttgatcttgttcaaattggagcaagaaatatgcaaaacttcgatttattaaaagaagttggaaaacgttgtacaaaaccagtgttattaaaaagaggattaagttcaacatatgaagaatggatcatgagtgccgaatatatcatggcaagtggaaatccaaatgtcattttatgtgaaagaggtgtgagaacatttgaatcatatacaagaaacacattggatttacaagcgataccagtgattaagaaattaactcatttaccaatcatcattgatccatcacatgccggaggaaaatggtggttagtcgaaccgatggcaaaggccgcagtagcagcagggtgtgatggtttgatgatagaagtgcataataatccagaatgtgcattatgtgatggaccacaatcattgaaaccaaagaaatatacagaattaattgaacaaattagagaaattggacatattgttggaaaagaagtttagaggagaaaaaagatggaaatgaaagtgaatttaggtaaagatagttatccgatttatattcaaaagggaatattagaacatgtcatagattatattcaacctatttatcaaggaaagaagattatgattatttctgatgatcaggtttatggatattatggtgaaaagctatttgaacaattagaaagttgttatgaggtgggacatattattgttcctcatggtgaacaatctaaacattttgatattttaccaagtctttatagtcaattactttcatttcaattgactcgtagtgatttaattattgctttaggtggaggtgttattggggatttggcaggttttgtagcaagtacttttttaagaggggttaaatttgtacaaattcctacatctttgcttgctcaagttgattcaagtgttggaggaaaagtggctgtagatttaccagaaggtaaaaatttagttggggcttttaaacatccattacttgttttgattgatccattgactttaaagactttggatgaaagatttattcatgatggtatgggggaagtgattaaatatggttgtatttttgatcaatccttatttcagcgtttagcaagctattcatcatttgaagaactttatgaagatattgatgagattatttatcgttgtgttgatttaaaaagagatgttgttgaaaaagatctctttgattttggtgatcgtttggctttgaattttggtcatacgttaggacatgcgcttgaacaatattatcattatgaaaaatattctcatggtgaggctgtaagtattggtatggtgcaattaacacatattgcagaaatacaaggtttaacaccaaaaggaacatctcaacttattaaagaagttgtggaaaaatatgagttacctactcaagcacatgtttctactcaagaattaaagaaagctatggctttggataaaaagaatatccatcagaagttatcttatgttttattaaaagaaattggacaatgttatatttatccaagtgatttaacattcattgatgttgtaaaggagatttaaaaaatggcagtgagtataaccccacattcattaaaaggacaagtttgtgttcctccatcaaaaagcatggctcatcgtgcaattatttgtgcgtcacttgcaagaggaagaagtacaattacaaatattgagtattcgcaagatataaaagcaacaattgctgctatgaaggcacttggaaccatgatttttgaatatgatgattatttagaaattgatggaacaacaacttttttaaaaaatcaatgtgaaattaattgttttgaatcaggttcaacattgagatttatggttcctatttcccttgtttgtgaagcaaatgttcattttattggggaaggtcgtttgggaaagagaccattagatgtttattatgatatctttgaaaaacaggggatttcttatttatatcgagaaaatgtattagatttatatgtgcgagggagattaagaggtggtgtttttgaaatcccaggaaacgtatcttcacaatttattagtggtttattatttgcattacctttaatggatgaagattcaattattaaaataacgtcacctttagaatctaaaggatatattgatttaactttacaaatgttaaatcaatatggtattcaagtcattaatcatgattatcaagaattgattattcctggttttcaacaatatgttgctcatgattatcgagttgaagcggatttttcacaagcagctttctatcttgttgccggagcacttggtaatgatgttgttttaacagatttaaatttagattcatttcaaggggataaagaagctattgatatcttagaaagaatgaatgctcatttaattacaaaagaaactggacatcaaatgatagcttcagatttaaaggcaacgattattgatggttcgcaatgtccagacattattcccgtgatagctttggcctgtgctttaagtcaaggaacaacgcggattgaacatattgctcgtttacggattaaggaatgtgatcgtttaaaagcaacggttgaagtgattaatcagttaggcggacatgctcaagaattagaagatgctatggttattgaaggggttgagcgtttaaaaggtggatatgtttcttcttataatgatcatcgtatggcaatgatggaagcaattgcttcgacagtttgtgaagaagcggttgtgattgatgaagaaaagtgtgtgaaaaaatcttatccaagtttttggcaacattttcaaatgttaggaggtctcatgaatgagtgcgaattggggaaataatattgagttatcgttgtttggtgaaagtcatggtaaagcgattgggatcgtgattggcaatttaccagcaggtgttgcattggatatggatgaaattcgttggcaaatgaaaagacgtgcacctggtcaaaataaaatgtccactccacgtgttgaaaaagatgaagttcaaattatgagtggattactggatggagtgacgactggagcaccactttgtgctatgattgaaaatagtgaccaacattctaaagattattcattacttaaagaatgcatgcgacctgggcatagtgattatccggcttatgtgaaatatcaaggttataatgatgtgcgtggtggtggtcatttttctggaagattaacagctccaattgtttttgccggaagtgtggctaaacaaattttaagacaaaaggggattattgttggggcccatattcaaagcattaaagatgtttatgatgattcatttggtgtagatataacatgtgaagatcttcaacaattaacaaaacaacaatatccaacacttaattcggatgtctttttaaaaatgcaaaatgtgattgaagatgtaagaatgaaacaagattcagttggaggaactattgaatgtgcaataatcaatgttccagctggtttaggaaatcctttttttgattccattgaatcacatttatcaccacttttatttagtattccagcagttaaaagtgtaagttttggaatgggtgaaaaaatgagtgaattgtatggtcatgaagcgaatgattgttattattatgaaggtgaaaaagtaaaaacaaagaccaatcataatggtggcattacgggtggaattagtaatgggatgccaattgtttttaaagtagctatcaaaccaacaccatcaatttctcaagttcaatcaacaatcaatgttaaaacaaaagaaaataccaaattagaaattacaggaaggcatgatccatgtattgttcctagagcagttgttgtagtagaatcaatggcagcaataggtatcttggatatgatgaaagatatatgaaagatttaaaaacatgtcgtgaagaaatcgatgcaattgatcaacaaatcattgctttatttgaacagagaatgaatgttgctaaagatgttattacttataaattagcgcatgatatggaaatattccaatctgctcgtgaacaggaagttattgaaaaaaatgttaatcgcataagaaatgaagaattaaaaggatatgcaaaaacttttattcaagatatgatgaatatttctaaaacttatcaagctacttttattcctagtgaaaatcactatcagttaaaagctccccgttttgataatattgttgtaggctatcaaggggttccaggttcattttcagaaagtgcattagaaacttattttaaagaaacaacgcaaagaaaaaactatgttcattttcaagatgtatttgaagctttaaaaaatgatgaaattgattatggggttgtgccacttgaaaattcatcaaccggtgcgattaatgataattatgatttaatacgggattatggtttttatgttgttggtgaacagagtattgctgtagaacaacatttacttggcttaccaggtagtcagattgaggatttgcgtgaagtctattcccatcctcaaggactcttacaaagcagtgactttttagatgctcatccttatattcaaaaacatgaatatttaaatactgcaacttcggcacaatttgttgcccaacaaaaaaatccaaccattgccgcaattgcttctcaaaaagctgcgcaactttatggattagaaatcttacaagaaaatattcaaaatttaaagacaaatgcaacacgttttattatctttggtaaaaatttagaaacatcacaagatgtttcgcatatcagccttgtctttactttaaaacatcatgttggaacgctttatcaagtgatgaaaattataaatgatcatcatatcaatatgttaagaatagaatcaagacctttaaaacaaacagcttgggaatattatttttatgttgatattgaaggtagtcttgaacaagaaaatattattttagcattagaagatttaaaagctcatacaattactttaagagttttaggcaactatgctaaaaaataggagaagttatgaaaaatattgtattaattggaattatgggatgtggaaaaacaacggtttcattattgttggcagaaaaacttgcaagaccagttattgatattgatgaatatttagaaaagaaatatcaaatgtcaattccagaaatgtttgctatgtcagaagcttattttagagaaagagaaacaatctgttgtcaggaagtttctaagttggatggatatattatttcaacaggtggcggagttataaaaaatccagaaaatatgaaggctttaaaagaaaatgggattgtgatttatatagatcgtcctatttctatgatattagaagatgttgagacatcttctcgtcctttattaaaagatggagcagaaaaactttttgatttatataaagaaagacatcaattgtatcttgatagttgtgactatcatatcatgaatgatgtaacaattgatgaattcataaacaatattataaactgtataaaagaaaacaaataggtgcaagatgagggtcttgcacctatgttcctttgatatagaggaaaaggattgaattgtagatgataaatatgaggttctttatcatcctcttatatcataacaaaaagttatggactttttgtgtcattttttgaaaaaaatgttaaaaaataatgacaaatatgtgacccttataataaaataagagtcaaggaggaaatcaaagtgaaacaatttttatgtattgatattggtggaacatccatgaagattggggttttgaatgaagaaggagaaatcttaaaaacggattctataaagagtcctgatacaattgagaaaatgtatcaaatcattgaagatgtttttcatagttatgaaaatattgaaggacttgcattaagtatgccaggggctgttgatagtgaaaagggaatcattggtggttcaagtgctttggattatattcatggtcctaagattaaagaagatttagaaagtcgaattcatgttcgtgtagagatggaaaatgatgcgaattgtgcagctttagcagaagtttggaaaggcgctgcaagtgatgttaatgattgttgttttatagtaagtggaacaggtattggaggtgctgtggttaaggataaacgtatccataaaggaaagcatcttcatggtggtgaatttggttatatgattgcggattttgattttacaacacatactatgaaaacatggtcagatgttggttctacaatggcagtggttagagaagttgccagattaaaaggagtggatgtcgcttctttggatgctaaagaaatctttgatcattatcatgaagatccaatttatgaaaaggttgttgataagttttattttgttttagcaaatggtatttataatttgcaatatgcttatgatccagaaaagattgtcattggtggagccattagtgttagagaagatttattggatgaagtgaatcttcgattagatgaaatttttaaaacttttacgcatgcaaaaattagaccagttgtttgtacttgtcaatatcataatgatgcgaatttattaggtgcgctttatcatttcttaacagtcaattcataaaggttttttataataaacaaagaaagaggtgaatgccatggcaaaacaaatgccacacgtccaatctaaattaagacatatcgtaaaagtacctgaatgtatttatgatgtttcaggtattaatgtgaatggtcgccgtattaaatcattggtcttttcgactgatgttgcagtcattgcgaattgtaatgctgatgcggtaattgctgtttatccatttacaccaacgatgcaaattactaagtcaattattgaggttgcacaaaaaccagtttttgcaggagttggtggaggaacaacatcaggaccaagagtcaataatattgctttagatgcagaattaaatggagcttcagcggttgttttaaatgcgccaacaaaaaccagatttgttcaagagttatcacagattgtggatattccaattgttttaacaattgtctctttggatgaaccattggaagaaagaatgcttcattctggagcaagtattgttaatgtttcgggtggtaaaaatacggttgcgattattaaagctttaagagagattgataagacttttccaattattgcaactggaggtccaagtgaagaaacaattaaagaagttattcaagcaggggctaatgcgattacttacacaccacctactaatggtgaaatatttaaagaaatgatggaaagatatcggatgcaatgttctcatcatgaataaaaaggttgaataatcaaacatttgtttgaattcaactttttttacggacatgaaagagattaatttaatgactttttaagatgaattcgctataataagcgatagaggtgataaatgaatgaaacagtatttagacatgtgtcaatatatattagaacatggacaagatcgtgatgatcgtacaggaactggaacacgtagtgtttttggctatcagacacgttatgatttaacagatggttttccattaatgacaacgaagaagatgtttttaagaccaattgctgaggaacttctatggttcattaagggtgatacaaatattaagtatctggttgatagaaatgtaaaaatttggaatgaatggccatatgaggcttttaaaaaatctgaagatttccatggagaaacattggaagaatttattgcaaaaataaaagaattacctgctgatgatccttttgttgtaaaatatggagaacttggacctgtttatgggagacaatggcgtaattttaataatgaaggtattgatcaagttgctaagcttgttgattctttaaaaaataatccgttttcaagaaggcatattatttgtgcatggaatccagcggaagttgatgaaatggctttacctccatgtcatgcttttttacaattttatgtttctcatgatcaaaaatatttatcttgtcaattatatcaaagaagtgcagatacttttttaggggtaccatttaatattgcctcttatgcattgtttacagcaatgcttgcacaagtttgtggatatgaggctaaagagtttatacatacgattggggatgcccatatttataaagatcattttgatgttgtgaaggaacaaatttctagaacacctttacctaaatgtcaattgaaattaaatcctgaagtgaaatctatttttgattttactattgatgatatcaaaatagaaaattatcaaagccatgggaaattggttggaaaggtgagtgtctaatgattagtattatagttgcaatggatgatgatcaattaattggaaagaaagattcttctaatggaatgccttgggtcaataaagaagatttaaaacattttaaagaaacaacaatcaataaaacaattttaatgggatatacaacatatcaagcaattggtagaccattaccaaatcgtaaaacaattgttgtaagctttgaaccttttgatgatgaacgtgttgaagtgagaacatctttagaagatgtcattgaagaatataaacaaagaaatgaagatttatttatttctggaggagcatctatttataaacaatctttacctttagctgatcagttattgatttctagaattcctgggtcacatacaggtgaaacttattttcctgattttaatgaatatggatttgaattggttgaaacaaaaccttatgaaacttttgatttacaaatctattgtcgaggtacaaaatgaaaagaattatatttttagtttttcgtttaatttatcgtattcctggatggttattaaagattcgttattataataaacatttagatacaacaagttttgaagaaagatttgattttactcaaaagttaattcgtaaagtgaatgaaaaatcaagagtacgtattcattgttatggaaaagagaatttacctaaggaacaaggttatttgattgctcctaatcatcagggattgtttgatgctttaattttatttggaactcatgataaaccttttaaggctattgttaaagaagaattaatggatgtttttgttttaaaagatgttttaaagatgattgaatttgttgctatggatagaagtaatttaagagcttcaatgaagattattaaaaatgcaacaaaggaaatgagtgctgggagaaattatgttatttttcctgaaggaacaagatgtcgaaaacaaaatcaaatgcttgaatttaaagggggaacttttaaatcggtaatggatgcgaaaaaacctattgttccagtagctttgattgattgttataaagtctttgataacaatacaattgctccagtagatgcacaaattcattatttagaacctatttattatgatgagtataaagatatgaatagtaccgaagttgcaagttatgttcaagcgagaattgcaaaatgtatagctgaaaatgaacatcgcttttaagaaggacagtttgtctttctttttcattttttgaaattttaagtgaatcatatatcaaacagtgttatactgtttatgtgaacattcgtcaaatgttgatgaaagataaatacaaatagaaatagggaggaaaaggaatggaaaataagtctttagatattcgttatgcgtgtattcatggcttttattggatgctttgctgttcaatgataggatatgcatctgtgtttttattagataaaggatttacgaatacaacaataggaactgttttagcaatttctaatattttggctgtttttggacaaccagctgtcgcttcttatatggataaaacatctaagttatctttaagaatgttgatttctttgattttggttgtgattattgctttatcattagtattatgttttttaactggggcttcaatggtcatggttgttttaacaattgttgcatttactttaatgttaacattgcaaccatttattaattcattaacatttgcttttgaaaaaaacggtattcatattaactttggtttagcaagaggaattggttcagttgcttatgctgtgatgtcacttattttaggaaatttagtggctgcatttagtcctgaattgttaccatttttctatgttggattatcactttgtgcattgttctttgtttatactttctttttaccaggacataaggatgaaattgttcatcaagaaaaagaaactgaacatgatcaattatcaatgggacaatttattaagaaatataaaacttttatgttattattagtggcaactgttttattattctttgatcattctgtgattaataatttctttattcaagttgtgaatcatattaatggaaacagtgctgatatgggaaatgctattttcttagctgctgtattggaattaccaacaatggcattgtttacaaaattccaacaaaagattggctgcaagaatatgatgcttatttcagctgtattctttagtgtgaaacatgttttaacttattttgctgtaaatatgtttatgatttatgttgctcaagtgatgcaaatgttagcatatgcagtatttatcccagcttcggtttattatgtgagtcaattggttgaagaacatgatatgaataaaggtcaggctttggttactggagccatgacgctggcaagtgtttttgcaagtttagctggtggggttttattagatgcattaggtgtttctaaagtcttgatgattggtgcgattatttcagtattagggacaatttgtatgtttataagtgttgaggatgttgatcagcatgcgaaaaaggaatcttagtgattcctttctttttgaataattttacaaattttacgatcataagttaataaaccatttacttcttcttcaatatcacttaattgggtataaacacaggcacataatcctttttcaatcagagggttaatggttttttgatataaagtttcataagcctgagttaattcttgtatacttgtgtagttttgatagccatagacttgatgaacactgatatgcttttcaatcgggcaggcatatccaccacattcggataagacaaatgcacggggatcagaaatgatttttggttcatcaaaataatgatgttcacttctaaaatctccacatttttggtcaaaccaaccacttgctgaatcaatgagccttgttgggtcaagttgacgaacatattgcgtaatcttctcagtagcaaattgtccccatccttcattaaataaaacccatgtactgatacaaggaaaatgtgaaagatgttcaattgttaattcacattctttgatccattcttcacgaccatgagcatcttttcttgccagtaatcgaagatgtttatcagaaatatgtttctttgtccaacttaataaagaaggcatccaggtaacaaaccatgtatgataagcttcaccaccattgatcatatcttgccaaacaatcattcctaaacgatcacaatgataataccatcgagcaggttcaattttgatgtgtttacgaatcatattaaagcctaatgatttcatcatttcaatatcatatatcaaagcttcatcggttggtgcagtatataaaccatctggccaataaccttgatctaaaacaccattcataaagataggttgatggtttaaacaaattcttggaatgtgttgatcatctttttcaattgaaaaacaacgcattgcaaaataacattctactttatcatcttgaatagatacataaagcttatagagataaggagaattgacatcccaagatattttattttcaataggtaatgtcacatcaataatattataagaagcttgcattaaaacgggtacttgttggttgatttgaaattgaatatcttgatgatattcatgatttaaaataacttttacatgaatctggtcatggtcataatcaggagtgatttttacatcttcaatatatgtctcgcctacccattcaagccaaacgctttgccaaattccgctttgagcagtatagtacatgccaccacgtttgagtcgttgttttcctttagcgtgataggaagtatcagagtcatcagtgacacggattgtgagaatatcatgttggtgatttaagtgattggttatatctatttgaaaaggtaaatatcctccgacatgatgaaaaacatgttgatggttgatatagatatcagcaatttgatcgactgctccaaagtgaagaaggtagtgaccgttttctttggttaaaggtggtaagactctctcataccataaataataacctggtaataattgtttttgaacttgtgacaattgactttctggagaaaaggggacgaggatttcaccttgaaaaagatgtgggatttctttttgttggttaattgcatagtgataaaaaccattaagattgatataattgtctcttttcatttgaggacgaggatagtcctctaaaacatgattagggtctaattgttggctccattttgtttttaaaggaatcagttcttctttttttttaaagagtcgaactgtttttattgcgttaagtagattcatgataatcacctcctttatgtgtttaaattcataaatctatcttcattatactctgcttatgtgaaaaagttaatgtggatgataaatgataaaaatatttttaaaatataaagaattttaaggaactaaaaaaatgttgatagaatcagtgaaaaaattcacaatcttgatttgaaatggagaattgtgtgaatatgacggcattttttggtgaaaatatcttgccatataaacgctttcaagatataatagagatagttcagaggaagatatagggaaggagaattttttatgaacaaattagtaaaagttttagctgcttcagctttagttgcaactgctttagttggatgtggtaaaaaagatggtgctactggtggagaaacaactgctgctaagtatgccaaagttggtttaggtgttgtaagttcaattaatgatgaaggtcaagttaattcaactatggctgcaattggattggacaaagatggaaaagttcaatatattgatattgacgtagctcaatctacacctggtgatgcaaaaggtgaacttacaaaaactaaaaaagaaagaaaagaagaatatggaatgaaagaaacttcagcaaaagctggaaaaatcaaagatggtggagaatggtatgaacaagctcaagccttcgaagaattctgtaaaaataaaactttagatcaaatcgctaaagttgaagttgaagattatcatggtggtaaagctccaaaaactggaactgatttagcttctaaatgtacaattacaattgatgatttcttagctgctgtagataaagctggtaagaacgctcaagctgttgatgctgcaaaaattggtatcggtgaagttatgcaaaatgatgctgagaaaaaacaattagatacaactattgctttagtagctactgatgatgctggtaaaatcgtttattcaaaaatcgatgttgctcaaatcttcaaaggtgtaactgatactaaatcagaaagaaaagaaaaatatggtatgaaagaaacttcagctaagaatggtaaaatcaaagatggtggagaatggtatgaacaagctcaagccttcgaagattcaatcaaaggtaaaactgtagctgatgttgctaaaattgaagttgaagattaccatggtggtaaagctccaaaaactggaactgatttagcttctaaatgtactattacaattgatgctttcttagaagcaatcgctgaagctggtagtgctttaaaataaaaaatataaaaactgcgaaaatatgtcgcagttttttttatttgttgttataatagagaacggtgatgaaattgaagaaattaataaatgtaatgattgttttaagctttttattgttaatgggatgtcaaaagaaaccacaactttattctaaagtttttactggaccttttgatacaattacacaatatatgagttatgcaacaaataaagatgattttgatagtcaatgtcaaatgattaaagaaaaattagaatattatgatcgtctttttgacaagtattcttcttatgatgatattaataatgtgaaaacaattaatgataatgcaggaataaaggcggttaaggttgatcaagcattgattgatttattaacgattagtattgaaagatataagacgatttctaataaggtcaatattgcttttgggagtgtgatagatatttggcatgattatcgtgaaagagctgaaagtcataatggagttggtgatgtaccaagtaaaaaagaacttgaaaaagcaaatttacatacaaatattgacagcataaagattgataaaaaagcaaaaacagtgtatattagtgataaattggtatcgattgacgtaggtgctacagcaaaaggctatgcgattgagttgattaagcaggatttaatcaagagtggtgttgataatttcttgttaagtggtggtggaaatgtagctagtcatggaaaaagaaaaatcacaaaagaaggagacttctatttgaaagaatgccaagatgaattctgtgttggtattgaatcacctaagaatgggaatttttctcataaagaaggagatgctgattctgaaaacgaagctgttttagttgtacaaggtgagtcaattgtaaccagtggagattatcaaagattctatgaagatattcatggagtaagatatcatcatttaattgatccagcgactttatttccagctgttcattttagaagtgtaagtattattactgatgatagtggattggctgattttcttagttcagcagttttcttaatgagttatgaagatggattgaagttagtgaattctttggatggagttgaggctatctggttattagaggatggtaagattagaatgtctaatggactcaaagataatgatcgtgtttatgtgattgataaaagtagattgaagtaggagggaatagagatgagttatagttatagaacgaaaggaacttgtgcgtcacgtattgattttgatgttgatagtgaaggtaaagtaagaggagttagatttattggtggatgttctgggaatacacaaggagttgctagacttattgaaggtatggataaggatgaagcaattgctcgtttagaaggaattcgttgtggagcgaaaccaacatcttgtccagatcaattagctaaagctttgaaagaatgtgagtaatttttactcactttttatttgtttaatattgtctatttttttatttttctcatatcatagaataaggtgagaaatatgatgatactacgaattaaaaagttacaattgttatgtgccatatgtatgatattacagttggtttgttataagtggattattccttttcattttatagcggttttattgagcttaattattattttgaatcagcgtttttttagagttattcaattacaatatcatttttatttgattggtttatatctttttaggttgtgggttatgagtattgaagcggtttatttgttgcagcttgtttatgttgttttatgtttgtatattgcggtgatgttgattcttttttcgtttcattgtattttataggttgcataaatatattgaaatatgcaactttgtgtgataaaataattataacaaagaataatagaggaaaaattctaggatgagtttttcttttttggtagttaaggaatagagtgctttgattatgttataatatgataaaatgaaaaagttaatctcaatgttttctatatataattgtatcttatgaggtcgaattttggtataatagtaaaataaaggagggtatcgtatgtttgggcatttacagatctatagttgttatagttttcaaaatagtacgattttaatgaaggatcttattcaagatgcaagtgctaaacatatggatgctttagccttgacggataagaataatatgtttggtgctttagagttttctaaagaatgtttaaagcatgggattaagcctatttttggattagaagcgagcattatgattgaaggagaaatctatccttttatcttgcttgctaaggatgatgttgggtattttgatttggtaaaggtttgttgtgatattaatttgagtgaggataaatgtatttctttaaagagtttatctttgtataaggaacatttgtttgttatttctggatgtgttgaaggtattgtggaaagattggttgctaaggaaatggaagatcaggcggttaaatatcttcaattactaaagaatgaatttcaagagaattattatgtgatgttacaaaatcatcatttgaaatatcaagagacatttaatgaaagaatgatttcattagctaaatatgttaaggttaaaattatatgttctaatgaagttcgttatttaaaaaaacaggatgctttggcaattgatttaatgcaagcttcattacaaggtgtgacattggatggtaaatatgagccagtaacacaggaaaaatatttaaagacagaagcagaaatgagccaattgtttgatcaagaaattattgaggaaaccaaacaggttcttgatttttgtaaagctacgattcctttatcacaaaagcatttaccttcatatcctgtacctcataacggtgatgcaagtcaatatttaagaagtttatgtaaagttggtttgaagaaaagattttctcatcaagatattccatcacaatatattgaaagattaaaatacgaattaaatattattcatcaaatgggatttgatgattactttttgattgtatgggattatgtgcgttatgcaaaaataaataaaattcaagtgggggctggcagaggaagtgctgctggaagtttggttgcttatgttttggggattacaaatgttgatccaattgaatatgatttgctttttgaacgttttttgaatcctgaacgtgtatctatgcctgatattgatattgattttcaagatgatcgtcgtgatgatgtgattcattatgtgattgataaatatggacaagatcatgcagcacagattgttacgtttaatacatatggacctcgtgttgcgattaaagacatgggaaaggttatggggattcctttagcacgattagaaattattgcgaagatgattcctactggacctaaaaataaaaagacgattacgcaaatgtatcaaacatcagcaaattttcaatcaatgataaatcaagatcgcttgttaaagaaaattattggtgcaacaagtgtcattgaacatttaccacgtaatatttcaactcatgcggcaggggttattttatcaaaagaacctttgcgtgatgttgttccacttattaatggaccgacttcaacaatgatgtcacagtattctaaagattatattgaagaagttggacttcttaaaatggattttttgggattgaagaatttaacaatgcttgattatatttgtaaggatattgaaagagatacacatcaaaatattgttttaaatagtataccattagataatcaaaagacttatgaattgatatcaaaagctgatacatttggagtttttcaattagagtctcaaggtatgagaaatttattgagaaagatgaaacctagttgttttgatgatattgtggcagctattgctttatttagaccaggaccaatggaaaatattccagcttatttaaagcgtaaagatcatttagagccagtgacttatccattgccagaacttgaaccaattttaaaatcaacttatggaatcatgatatatcaagaacagctgatgcaggttgcccaaaaaatggcaggtttttcattaggaaaagctgatatactaaggaaggcaacttctaagaaagaaacaaaattgatgttatcgatgaaagaagaatttattgaaggttgtttaaaacagggatatacattagagaaggctcatgaagtttttgatttgattgagaagtttgcaaattatggatttaataaatcgcatagtgttgcttatggatatattgcttatcagttggcttatttaaaagccaattatccactttatttctttgcttctattttgtctaatgaattatctagtgaaacaacaaaattacattgtattcaagagtgtaaggcatatcatgtggatatcttgccaccatctgtaaatcattcgcatgcgcgttttatggtggagaatggtcatattcgttattctttgttagctattaaaaatgtgggttatgcaggatataaggccattatagaagaaagaaaaaaaggattgtttgtagatgtttttgattttgtaacacgtatggatgaatcaagggtgtctaaaaaaatgattgaatctttgattgatgctggagcgttagatgaatttgggatgtcacgagcaacaatctttaagaatcttgatagtatacgggattatggaagtttaagaaatagtttaggaattgatgaaaaaccagtcttaacgatttataaagatcaacaagaggaaaaattagcgaaggaaaaagcagtcttaggaatttatttatcaatgcatcctattgaattgatgaaagctaagttaggggttccttatgtaaatgtatcttcgttatatgaatatgttaatcaacatgtcaatattgttgttcaacttcaaagaattaaaaatattacagatcgtaaaggtgatgaaatgtgttttattgaaggttttgatgaaacgggcagtattgatggcgtggtttttgcttctaggtataaaagtataggtatgatgttaaagaaaggaaatatatgtcttattaatggtaaagtagatatgaaagacaagttatcgtttattattgataaggcgagggtgattgaatagatatggaagaattagttttaatagatggaaactcgttattgtttaaagcttattatgcgacagccgcaatgggtaacttgatggtgaataaagatggtattccaaccaatgcagtttttggttttgctaatatgttgcaaaggattttacaaagagaagcagcgtatttggttgttgcttttgattatggtaagaaaacatttagaaatgatttattagatgaatataaagcgacaagaaaagaaacacctgatgaattaaagtgtcaatttgcaatgattagagaatttttagatgcttatcagattccttattttgaaatggagggatttgaaggtgatgatttgattgggacgctttcagccttagcagaaaaagaaggtttgagtgtatctatttttacgggggataaagatgcatttcaattggtgtctgatcaaacaacagtttatcggacagttaaaggagttactcaattagatatttatactccagcaacattacaagaaaaatatggtttagagcctgatcaaataagagatttcttaggtttgatgggagatagtgctgataatattcctggaattaaaggagttggtgaaaaaacagcattgaaattgttgcatgaatatggaacaattgaaaacttgaaagaacatgctcatgaaattaaaggtaaaatgggtgaaaagattcgtgaaaatattgatttaggattacaatcaaaaaaaatagcgactattcttcgtgatattccgatggaattagatttagatgatgcacgttatacaggttatgattttgaaaaattgaaagctttttatcaaaaatatgatatgaattctttattgaaaaagatttctgtggaatcaagacaaccacaaacaagtgaattgaagtttgaaattgttgagcacatgcctgcaattactcaagatagcagtgttattggagctatttatgatcaaaattatcataagtctattgtcttaggttatgctttatataatgccagtcaagcttattttatcacctttgaaaatgctttaaaggatgaagaatttttaaaatatttaagtaatgacaattatcataaatacagctataacattaaagctcaaattttatcagctaaatggaatggcattgaaataaaaggaatggattttgacttacagcttgcttcatatattttaaatccaagtttaaaagatgaaatgaagtatatttgtgattactatggttatacatctttacaatatgaagaagaagtttttggtaagaatacgaaaaaacatattcctgaattatcgttgcttgctaaacatacagtttccaaagcaaaggctatttatgaattaaaagatgaagcgattagaaaattaaaggaagaagaacaatatgatttatatcaaacattagaattgccagtggcttatattttagctgaaatggaatatactggagctaaggttgatattcaggttttaaaagatttagaaaagacatttgaacatcaaattaaagagatagaagaagatatttatatgttggctgatgaaaagtttaatatttcttcacctaagcaattaggagaaattttatttaataaactaggtttacctaatggtaaaaaaaccaagagtggttattcaacatctcaagatatcttagaaaaaatagaagatttacatcctattgttcctttgattcaacaatatcgtatgcttacaaaattaacgtcaacctatgttaaaggtttacaagaacaagtttttcctgatgggaagattcatacaatctttaatcaagctttaacacaaacaggaagattatcatctattgatcctaacttacaaaatatacctgtacgtcaagaagaaggaaaattaattagaaaagcctttgttgcaagtcatgattacttagtgacatttgattattcacaaatcgaattacgtatcttagctcatttagctcaggtgaaatcattaattgaagcttttaaccaggataaagatattcatacacatactgctgctttagtttttaaagtgaaggatgaagaagtaacatcaaatatgcgtcgtcaagctaaggcagttaattttggaattatttatggaatgggtgaatttagattatctaaacaaattggggtttctttagcggaagcaaaagaatttattagaagatattttgaagaatatcctgaaattagaagttatatggataatattgttgaagattgtaaaaaagatggatatgtttcaactgtgttgaatcgtaaacgttatattccaacgattaatgataaaaactttattgttagagaacaagcaaaacgttttgcgatgaattcaccgattcaaggaagtggagctgatattttaaaattagctatggtaaaggttgatcaattgatgaaagaaaaacaattgaaatcaaaaatgattttgcaagttcacgatgaattgatctttgatgtttataaagaagaattagatgaaatgatgacaattatcaaatcagcaatggaagaagcgttcttgatggatgttcctttaaaagttgatggtgcttatgcaaccaattggtatgatttgaaatagtaggtgagattatgccagagctaccagaagtcgaaaccgtaagacaaacattaagacaatttatattggatgaagaaattttaggaatagatgtttattatgataaaattattaatggtgatacgaatgaatttgtgaatcgtttgactcatcaaacgattagagagattgatcgttatgggaaatatttgatctttttattagatgaagatgcttttgtttcacatttaagaatggaaggaaagtatcatattgtagatagtcatgaaccagttgataagcatactcatgtagtctttcatttgaaaaatcatcgtgatttacgctatattgatacgcgtaagtttggacgaatggaattgactgatttatatcattatagagaattagaaccgctaaaaaagctaggaaaagagccttttgatatcagtgatgaagaactgtatgctttattacacaaaacatcattgcctattaaatcagctttattagatcaaagtataatgtgtgggattggtaacatttatgcaaatgagatatgttttttaatgaagattgatcctcgtacaaaagcttcaagactttctaaaaaacgtgttcatgaattaagaaatattgcgattgaagttttaaagagtgcaattgcccaagggggaacgacaattcattcttttgatgctaatgggattcatggtctttttcaggtggaattaaacgttcatgtgcaaaagatatgtcccgtgtgccaaggtgaaattaaaaaaatagtcgtgaatcaaagaggtacatattattgtccgcattgtcaaaaaaggaggtattgatatgattcgttggggtattttaggattaggtaatattgcgaaaagatttatgcaaggtttagcatattttgatgatgcttcactttatgcaatagcaagctatacagtaaaaaagcgtgaagaatttgttcatgagcatcctgatgttattgcatatgataattatcatgctttattagatgacaagaatattgatgctgtctatattgcaatgcgacataatgatcattatcagtgggcaaaagaagctttgatgaaaggaaaggccgttctttgtgaaaagccagcaactttatctttaaatcaaacacaggaactttgttatttagccattcaaaatcatacattttttatggaagcaatgaaaacaagatttattcctttgattgatgatataaaaaaggaacttgatagtggagtgattggagatattttaaatattgaaacttacttttgctcagatgttccttatcagcctcagcattatctttttgatgagaaacaagggggagcactttatgatgtagggatttacaatgttgcttctacccttgattatattcattcaccacttgtaaaagtacgtgcaaattgtaagaaaaattatggtgtagatgttcatgatgttttccatttgactttcgaaaatggacaaaaggcacgtattgaaattgctatagatgaaaagaaggcaaaaaagatggtgattactggaacaaaaggaaagctcattgctgaacctttctatcgtcctgttcaggcaataattattacagatgaacaacgtgtaattgaaaaaccatatatgaatgataatgatttttatggtgaaattgctgaagttcatcgttgtttaaaagaacatttgattgaaagtgaaagaatgtcttttcaagattctattttgtgtatgaaggttattgaagatatgaaggagagttgtgcatgacaagggtcattggattgactggctctattgctgtgggtaagagtacagttacacattatttattaactcatggttatcaagtggtagatgctgataagatttctcatgatgcattgaatccaggaaattcttgttatgaaaaggtgaaagaactgtttggttgtttaaacgaagatggaacaatgaatcggcaagcattgggtgatattgtttttaaagatcatcaaaaaaaagagactttagaaaatattattcatccatatgtgattaaaatgattcaaaaggctattcaagagtgtcaggatgatttgattttcttagatattcctttattatttgaagttcacttggaatatttatgtgataagattttagttgtttatgttgatgaagaattacagttaaaacgtttaatgagaagaaataagattgatgaagaaaaagcaaagcatttaatcaggcaacaaatatcaattgaaaataaaaagatgatgggtgattatgtcattgataatcgtcagaattttgaagatttatatcaaaatatagaaagggtattaaaggtattaaaagatgaaactatatatgagtgatttatatagagtggaattgcattatccattagatgatgttcaaatggatagtttatattatctttatcagccgattgtaggggctagtgctatttcactttatatgatgcttattgttgaaggaaagagaatgaataaagtgattacaccttcctctctatcaagattaaatgcttttttatcaatgagcttattagatatagaaaaatatttgaaaaccttggaagctattggtctattaaagacttatgttaagcatgaaaatgatttaacacaatatgtttatcaaattcattcacctttatcaatcaaagctttttttaaaaatcaaattcttgcttctttattagaagattccttgtcaccagatgattttcaaaagacaattcaatattttaaaatatctttagaagatttgactcattatgaggatattacagcaagattccaagatgtttttcatattcagcatcttaaaaaaggtggaagaatcttaaagtataaagaagaatttcaggaaagaatgcaaaaggatgtagagatatcttatgattatgatttattgttaaaagctttatcaaattatcaaattaatcgttctttgttaactcaagaagattttcattatatgactcaacttgcaagtgtttattcaatagatgctttaacactcgccggttttgttaaagatgcaatgcaatctcaaggattgaatcgtgaactattaaaaactcaaatcaaaaaacatatggaaataagtgaatcatcacaattaaaagaaatctatcacaaacaacctttacaatatcaaacccaagatcaacaagattcaccacttgttttacatatgaaatatttagacagtattaccccatatgaactcttaaaagaaaaacaaggtggtcgtgaaccggtctttcatgatttaatgattgttgaaactttgatgttgcaactaggattaaagccagctgtggttaatgtgttaatagaatatgtgcttgggaaaaacaataatcgtttatcgaaacgttattgtgaagcaattgggtcttcatgggttcgtaagaatattttaacagcaatggatgcttataatgaattaatgaataaagatgaagaagaaactcaagaagttcaagaaaaaagtgttcaagaagaaaaaccacaagttgaatcaacagatgaattaatgaatttgcttagtcaattgaaggaggggcaattatgaaaaaaataggagatatgatgaatcaaacagatattgaagatatgaaaaaagaaagcatatatgccttagcttcacaaaagcatattcaagcttttttacaaaaccatcacttacagccatcaattatggatgattattgggttgagtttttagattataatgatgattatcatatgtgtcttgattgtcaatctttagaaagttgtccaaaagcaaataaaggaatgaaaaagaatctggtttatcatgatggagatattgttttagaattagagagttgtgcatatggaaaatctttagaaaaaagacgtttgttgctggaaaagtttgtgattacaaatatgaatgatgatttattattaacggatttaacgtctttaaatatcgttaaaaatgctcaaagcttatcaccaaatggacaatatgcattaggaaatattttaaagtatattcaagaacctagtgataaaggattgtttttacatggtgaaatgggttgtggaaagacaactttgttagcgggattaatgaattcgttagctaaaaagggaaaagagataggttttattcattttccaacttatttgattgatttgaaagctagcttttcaactggtgataatgaatatgctatggataaattaatgaaagttgattatttattgttagatggaattggtgaagaaaatgtgacgcaatggtcaagagatgaaatcttgttgtcaattttatcttatcgtttgcttaatcatttgccaactttttttacaagtatgtacggttataaagatttaaaaaaggtctatactataaaaaaaggtgatgaaattcgagcaaatacaattatttcaaaattgaaagcgctaagcattgaaataatgcttgacgagggcaaaatgaagatatagaatgttaacaaaagtgtagaatatatcaatgttttatgatagaatcaaaatgctataaagtgagaggagaagtgttatggtaaaatgtattggaatccttacttctggaggagatgcgcctggaatgaatgcagccattcgtgctgtcacaagaacttgtttgaacaagggaattaaggtttatggtgtaagattaggttataaagggttacatgatggtgacttcattgaatttgatagtcacagtacacgtaatattattaatattggcgggactttcttaaaatctgcacgtttccctgaattcaaagatcctgaagtgagaaaagaagccattgaacaaatgaaaaaagtgggtatggaagctttggttgttattggtggagacggaagctacaatggtgctttaaaattaactgaaatgggaattaattgtattggaattcctggtacaattgataatgatattcctgatactgattttacaattgggtttgatactgcattaaatacaattgtagatgcgttagataaattaagagatacttcaagttcacatcaaagatgtacaattcttgaagttatgggtagaagatgtggagatttagctgttcatgctggacttgcttgtggagcagaaatgatcgtaacaagtgaaagtggttttgatgaagctgaaattattgaaactttaaaacgttcaaaagcatctgataaaaaacacgcgttagttgttattactgaacatattactgatgttcatgctttagcaaaacgtattgaagaagcaactggatttgaaacacgtgcaaatgttttaggacatatgcaaagaggtggaagtccaacagctagagatcgtgttttagcaacacgtttaggaattaaagccgtagaacttcttgaagaaggaaaaggtggattatgcgtaagtgatgttaagggtgaaatcattggattacctattgaagaagtcttaagtcataaacgtaaagtcaatcaaggtatttacgaagatgttttaaaacttcgttaatatataaatagaagggtataggagataaagtaaagtatgaaagataaaatgaaaaagacgaaaattgtttgtacaattggacctgcatctgaaaatccaaagatgctaaaaaaattagttttagcagggatgaatgttatgcgttgtaacttctcacatggtgatttcgaagaacatggtaaaaaaatgcaaactatgcgtgaagtcaatgctgagttaggaactcactgtgctatccttttagatacaaaaggacctgaaatccgtactggagattttgaaggtggatttactgaattcaaaaaaggtcaagtatctactatctgtgttgaagatatcgtaggaacagctgatcgtttcactatttcttacaaagatttatataaagatgttaaacctggtggttttatcttagttaatgatggtcaagttgaattattagttgaccatgttgaaggtactgatattgtttgtgtttgtgcaaatgacggtaaagtaaaaaataaacgtggaattaatgttccaggtattgaattaggatttgaattcatttctgaaaaagacagagctgacttagtatttggatgtgaacaagatgtagattacatcgctgcttcattcgtacgtcgtcctcaagacgttttagatgtgaaaaaagttcttgttgaaaatggtaaacctgaaattcaaatcatcgctaagattgaaaatagtgaaggtgttgaaaagatggatgatattatcaaagttgctgatggtatcatggtagcacgtggagatttaggtgttgaagttccagctgaagatgtacctttaattcaaaaagaattaattagaaaatgtaaagctgctggtaaaatcgttattactgcaactcaaatgcttgaatcaatgcaagaaaatccaagaccaactcgtgctgaagtaagtgacgttgctaatgctatctttgatggtactgatgcaatcatgttatcaggagaatctgcacaaggtaaatatcctgaagaagccgttatggttatgaacaaaatcgctttaaaaactgaatctactttagattatgcttctttacatagaaaagcagtattaacagctacagatgatagttctgaagctatctgtatgtcagttgctgaaattgctaataaatttgatgtttctgctattattgcatttactgaatctggatttacagcaaagaaaatgtcaagatatagaccagaatgtccaattattgcagctacaccttttgaaaaaactactaagaaattagctattaactggggtattaaagctgttgtatgtaaacaaatggatacaagagaaggtttattaaacttagcagaagttattgctaaagaaaacggtattaatgctggtgaaactattttagtaactggtggtactccaggtgttgaaggaactacaagttatttacaattagttacagttaagtaattgttgaaatgagatgtctaaatgacatctttttttcatgatgagaaaaatttaaactttcatattttttacacatcattatgttattgtgtatatgaggtgagatgaatgtttcaaaatatttctcataaaataatcatatgttcttatttatttttctttgggaatataataagaatctgttataaagaaatagaacatgtgactcaattagaaaatagtttatctatatcatcagttatgattttgaatattatacaaaattgttttcaaatatttcttgtttctttaatgatttatggaataggatatttgtttggttgttttgaaaaaatacactatcatgacaatatttcaaaatatgaaaaataaaaatgttgatgtttgttttatgataaagttaaagaaaaaggaggagatatagttaatgaaagtttctaaaatacttaaggcttgtgcgtatctttttcttggtgggaatattattagagaagcttaccagatagctgttaatacttcgtatttaaatacaggaaaattaatgggtgttgaatcaatgtttatgcttctttggtcttgttttgtttcatttattattgcattagtgatttatggtttgggtgaaattatagaatattatgaaattgctaaagagaaacatgcagatgacttgacaaaaaagaatattgatgtaaaatagtgctacaagcaatgatttaggatatgtctgtataaggttattgtttagagaggaaacggctggtgaaagtttctcaagacttataaaggtactccctaatagctacactcgaaagagattgtcgtgaaactgcgttaaggtgaatgaggttatcaaattgataacgaataaaggtggtaccacgagatttcgtcctttggatgaagtctcttttttatataagaggaggatggactatgcatgatgcaaaacttgtttttccagattattgtcatcaacaggcgatggaaacatttgttaaggaattaagaaatcatgatcatgaaggattaaatggtgtgggattctatgaaagttatgaaaatgattttgtgagttggattcaaaaagaaaaacaaatgcatttaggcattcatatggatgaaggtcttgttcctggaacaacttttctttatatgttagatgatgaaatcgttggaagtatcaatattcgtcattgtttaaatgattatttaaaaaatattggtggacatattggttacagcattgcccctaaatatcgtagacagggctttgcgactaagatgttacaggaagcgttgaagttttgtaaacaatgggagatatggcctgtccttgtcacctgtgatgaagacaatatggcttcaaagaaaaccatagaaaaatgtggtggtatttttgaaaataaatatagtcatgaaggaaatgttactttaagatattggattggaggagaagaaaaatgagagattttaaaaatgaagaagctttaaatactttaaaccattcttgtgcgcatgtgatggcacaagcagtaaaacatttgtatccaaatgctaagttttgggtaggaccagttgttagtgaaggattttattatgatatcgatttaggtgatcaagtaattactgatgaagatttacctaagattgaaaaagaaatgaaaaaaatctgtaaagatggaaaaagaattatcagagaagaaatttctaaagatgaagctttagaaatgtttaaagatgatccttataagattgatttaataggtggattggaagatggaaatattacttgttatcgtcaaggagatttcgtagatttatgccgtggaccacacgttgaaacagtaaaattatgtaaaaactttaaattattaaaacattctggtgcttattggaaaggtgataaaaataataaagttttacaaagaatctatggtgtttgtttcccaactcctgaagaattacaagaacatttggatttcttagaagaagctaagaaaagagatcataagaaattaggtagagaattagatttatttatgatgagtgaatatgctcctggtatgccattcttcttaccacatgggatgttacttagaaatacacttgaacaatattggtatgaagaacatgctaaagaaggttatgaatttatcaaaacaccaattatgatgtctaaagaattatgggaagtttcaggacactggtataactataaagaaaatatgtatacaagttatgtcgatgatcgtgaatttgcgattaagccaatgaactgccctgggtcaatgttagtttataaaaatggattacattcttacaaagatttaccacttcgtatgggtgaacttggacaagtgcatagacatgaagccagtggagctttaaatggtttatttagagttcgtacttttactcaagatgatgcgcatatctttatgacaccagatcaaattgaaagtgaagttgtgagattaattgcctttattgatcgtgtatattcaaatcttggcttaccttatgaaattgaattatcaacacgtccagaagaaaaatatattggtgaaattgaaatttgggaaaagagcgaagctgctttagctgctgcatgtaaagccgctggaaaagattataaaatcaatccaggagatggggcattctatggtcctaaattagacttccatgttaaggattcattaggtagagtttggcaatgtggaacaatccaacttgatatgaacttaccagaaagatttgatttaacttatgttgatcataatggtgataaagtgagaccagttatgttacacagagttatctttggttctattgaaagatttattggtatcttaattgaacactttgctggtgctttcccattatggttagcgccaactcaagtgaaagtcattccagttaaaaatgaatatcacttagaatattcaaaagaagtctttaaattattagaagataaaggaattcgtgtggaattagatgatcgtgaagaaaaattaggatatcgtattagagaagcacaaatgaaaaagattccttatcaattggttttaggtgataaagaaagagatgaaagaactgtgacttatcgtcaatatggtgaacaaaaacaaacaactgtatcattagatgaatttgtgaatatggttttaaaacaaattgaagaaaaaacaagatagaaaagtcctttgggactttttctatttttaaaaataaatgactttttattgactataggcttaccctatagtatatgatatatgtattatacgaaaaaggagggctagctatgttacttatctggaagtatttaaaaaagtataagaagttactcattttgaatatgatatctgtttttggttttgcattggttgaattaggattaccaacaattattgccaatatgattgattatggggtttctacacataatcaaagttatttatattctatgtggtttttatctattataatttcaatattaggtgttggaggaacgattttacttggtttttgttgtgctaagatttctacttcaattacaagagatattcgtaatgaaatctttaccaaagtacaaaccttttcaccttatgaatttaatcaatttggaatatcatcattaattacacgtacaaacaatgatgcttttcaaattcaaatgtttattaatgtgattttaagaacagcattattgacaccagttatggttattattagttttgtaatgactttaagaacatcacttgatttatctttaatcattgcagcaactttacctattattgtattaggggttattattgttgcgaaagtatctgaaccattatcacaaaaacaacaatcatcattagatcgtttaaatcgtattacacgtgaaaatctttcaggattaaaagttattcgtgcttttaataatgatgattatgaacaagaaagatttaatgaaacaaataatcagtttacaagttatacaaagaaaatctttaagttaatgacattaacacaaccaacattttacttaatgatgaatattgcaactctactgattttctatgttgctagtacaatgatcaatgtaggaactttacaagttggaaagttagttgcatttcaagattatttattccatgctatgttttctatgatgttgttttgcagtgtttttattatgtatccacgtgctgctgtttcagccaaacgtattcaagaagttttaaatacgaacagtcacattcatgatgataagaatttagataatccacaagttgaacatcattcattggtttttaatcatgtgacttttgtttatcctgatagcgaagaagctgttttaaaagatatctcatttgaagctcatgagggagaaacagtggcttttattggaagtactggttctggtaaaagtacattgattaacttaattcctcgcttttatgatgtgagttgtggtgaggttttggttgatggaatgaatgttaaagattaccagatgaatgttttaagagataagattggttttattccccaaaaggccatgttgtttacgggaacaattgctgaaaatatgaaatatggaaaagaggatgcaactttagaagaattagaacatgctgctaaagtttctcaaagttatgattttatttgtgaaaaacctttaggttttgacgaagtgattacagaaagtgcaacaaatgtgtcaggtggacaacgtcaacgtttaagtattgctagagcgttaattaaaaagccagaaatttatatttttgatgattctttttcagctcttgattttaagacggatgcgactttaagaaaggcacttaaacaagaaacaaagaaatcaattgttttgattgttgctcaacgtatttcaacaattatggatgctgataaaattattgttttggatgaaggaaaggttgttgggcaagggaaacatcatgaattgttgaagaattgtccaatctatcatgagattgcagcatctcaattaagtgaggaggagttggcttatgagtaaaaaatggcaaacttttaaaacgtcaatcaaacagctttccccttttatctctccttataaatggggcttctttacagcaatgtttatggttattgtgacgtgttttgctttatctgtttcaccaatggtagaaggaatgatgacttctttattgatgaaaaatgcaatggatattgctaataaagtggaaggagcaggcgtagaatttgataaagtcatgcaaattatgatggttttattaggactatatttgttaaagactacgtctcaatcagtgacgacaattactttaacaaattctattcaaaatgcgatgcatgatttaagaaatgctttacaagataaaattagaaaattacctgtcagttattttgatatacatcaatatggtgatatattaagtcgtattacaaatgatgttgatacattatctaatgctttacaacaaacattaactgaaatgattcgaggaacattgatgttaatattagccattattatgatgtttaatatcaatgttttcatgactttcgttgttcttttgattattccagcggctttatttataacgaaagttattgtcaaacgttcacaacgaaagttccaggctcaacaagatgctttaggaaaattaaatggtgctattacagaaatgtatactggctataatgaaatcttgctttttaataagcaacaacaatcaattgataaatttaaagatattaatgaaaatttatgtcaaaatgcatttcaagctcaatttatgtcatcgattatttctccttgtatttctttagtgacttatattattattggtacaatcggttttttaggaagtttatttgctatgcaaggaaaattattgataggggaattacaagcttttgttcgttatatttggcaagttaatgatcctatatcacaagtgagtaatttatcttctcaaattcaatcggcctttgctgctgctcatcgtatttttgaagttttgaatgaagatgaagaaccattgattgaaaatgttcaagttctagatcatgttgaaggtcatgtagaattagagcatatttgttttggatatcatgacgaagaagttttacatgatattgatgtagatatcaaaagtggacaaatggttgcagttgttggaccaacgggttcagggaaaacaactttaattagtttgttaatgcgtttttatgatacaacttcaggaagtatcaagatagatggcgtagatattagaaatatgccaagagagcaattacgctctatttttggaatggttttacaagacacttggctatttcatggaagtatctatgataacattcgttatggtcgcttagatgcaagaaaagatgaagtcattgccgcagctagacaagccaatgttgatcattttatcagaactttacctgatggttatgatatgattgtgaatgaagaagcaaataatatttcacaaggagagaaacaacttttaacaattgctagagcaattcttaaaaatccgccaattatgatattagatgaagccacttcttcagtagatacacgtttggaaaagatgttacaagaagctatgcataatgttatgcaaggacgaacaagttttgtgattgcccatcgattatctacaattagaaatgctgatctaatattggttatcaaggatggacatctgattgaaaaaggaacacatgatgaattgattcatcaagatgggttttataagcaattgtataatgcgcaattccaagatatgtaataggataatatgtgaaattatgtgaagtagaaaataaaaaagaaatttgccctcttactctcgtatatagaagtaggagggcttttttatgataatgaaaagaaagaaaattgttgattttaaaaatgatgttttgttcaagtataccttgagagatgatcaggaccctgattctatttatcttcttaaactcatcattgaaaacatcgctggcattgactgccattcactcaaggtcttgaatcccgatctcaatcctcagcatgtcgaagataaggatatgattctggatatcagagtcaccaatgaagatggtgaaatctgtgatgtcgagatgcagaattcatcacttgaccaggagcagtatcaaaggttccagatctatggagcaagactactcgtagaacagcaaaagagaggagatgactatgtcactaacattcatcatgtgtttcagttgatattcatcgatgatctggataaggacaatctggtactaatagacaggtatatcagtcagaatgaatcagggaatcaggagaaacataacttgatcacgagaatctacatatatctaccctatatcaatatcctaaagaaggaaaagggattagagaacttcaatgaactagaaacagcgatctacatatttaaaaatggaatcgatgatgatataatgaagttaaagaagaaggtggtggatatcatggagaagaaggcagatgattttaatgaagatatgattctacaggacatggcattcaaccgtgatttaaacaagcgagcaagacaggcaagaatgaaaagagaacgtgacgaaggaaaagaagaagggctgcaggaaggattagctgaagggaaaaagtttggtaaaagagatttcgtattaaaattgtttatcaagacatatccacaagctgaaacaggatttctggaaaacctatccgtggagcagtacgaaaagatatttgacttacttattgaaaaagcaagtctagaaaagatatatgaagctgcggattgtataaaagggtaaacttggaataaaagggaggtttctagtgatagagacttccttttgcatattttgatagattaaaaataaaatgaaatctttaaatacatttgtcaatgattagaaaagtataataaattgaataaaataatagaatatcgtgattgttataagctttttgtattgaccttttacttttatagtgaagttgtgtataatagtaaaaacaaagagaggaaataaacatgagtattaggggaataaaaaatcaatcaaatgatatctatttaaagtatcgtcaacaaattatacctgaattcttttatgttggttatgtggggttattagcgcaatatttaagaagtggtttattttcattttttgtatctttgtttttatgcccaattgctcatggatatgtaaaatgtgcaatgactttggttgatgagaaaaagccaagaattgattaccatcagtcaatgataggaattatagaatttgctagagttgcaccagcttatcttatgcgtaaggcaattattctttttgttgttttgttagttgcattaccaactttattttctattcattcattgatacctgaattatcattagaatggatatcatcgattggaaatgctttaatacagacagaatattttattcctaattttgaaggaatacaacttattatgcataatagtttactcatattaaatattattgtttgtattttggtttatttatttttgactgcattatttatgccggttccatatgtcatggagttagaagaattttcttggagtgaatgtatttcttattctattcggttgatgagaaaaaatatttttaacttttttgaattgtacttagtttatatgatcagacatatgatatactgggttttaacaggaattgttatcctgattgtggggtcaattaatgaaatattaatgttgttttgtatggttacttctttatttttatatattgaagtttttaagggtagatttgaaatagcaaagtatttattttacaaagaaataacagggggatatgatgaaaagagaaatagcgagaatcaagaagattatcattaaagtaggttcatcttctttatgcaatcaaaatggggaaattgataaagaaaaaatattaaacatagcattacagatttctaaattaaaaaaacaaggctatatagttgtattggtctcatcaggagcaattgcggcaggaatgggagcattacatttaaaaagtaaacctagtacgattccagaaaaacaagcattggcagctattggacaagctcaacttatgcagatttatgaagaaatttttcatatctttcatttagattgtgcacaggttttattaaatcatggcgattttgatgatcgtaagagattgttgaatttatcaaatacaatgcatgctttaatggattatggtgtcattccaattgtcaatgaaaatgatgccttagcagttgatgaaattaaagtaggagataatgatacattatcggctttattagtgcctgttgttgatgctgatttattaattttagtgagtgatattgatgggttatatacaagtcatcctggaaagaatccagatgctaagttattaaaatatgttgaatgtgtaacagatgaaattaaacaaatggctggagaaccatcttcttctttaggaactggtggaatgatgacaaaaattaaagctgctcaaattgttaatgattatggacgtgatatggtcattattaatggtggaaaagaaaatagtatattacatgtttttgataatgaagaaggaacttggttcaatggacatagtggtaaaaatttaaatgcgaggctacactggattgcttatcgtagtaatgccaaaggaaaggttattttagatgatggcgctgttttggcaattgaagaacaaagaaagagtttattggctaaaggagtcattgatgtaagtggtcattttttgatgggacaggtcattgatcttgtagatcaacagggaaagaagattgctaaaggaattagtaattattcaagtgatgaaattaagctcattatgggtcatgatagtcaagatattgaatcaattttacattataaggattatgatgaagtcattcatgcgaataatatggtggtgttaggaggagaaagtcatggataaatgtttattaaaacagttaactgaggcaaaagatgcgagtcgtttaatgaaaaatataagtcaagaagataaaaacaaagcattgcttaatatatcttcagctttacttgaacatattgatgaaattattatagagaatcaaaaagacatagcatgtgctaaagaaaacaatatgtcaccagctatgattgatcggctgcttttagattgtcaacggattcaatcaatggctcaggacgttagaaaactaacacaattagaagatccaataggacaagttattcgtgaaatagagcgtcctaatggattgcatattcaacaagtgagagttcctattggtgtttttgcgattatatatgaatctcgtcctaatgtaaccgtggatattgcatgtttatgtttaaaatcaagtaatgtttgtgttttaaaaggtgggaaagaagccattcattctaatcgtattttaacaagattaatgcaagaagcaaccaaagatattttaccttatggttgtatccatttgattgataatactgatcgtttaattgttaatgaattaattcaagcaaatgattatgttgatgttgttgttcctagaggtggaaagggattaattgattttgtggttaaaaatgcaacagttccagtgattgaaaccggggcaggcaattgtcatctttatattgataaagaagcagatatgcaaaaagctattgatattagtgtgaatgctaaaatacaaagaccatcagtgtgtaatgcgattgaaacaatccttgttcatcaagatatagctcatgtttatttgccattaatggtaaaagcgtttgatggaaaagttgaaattcgtggcgatgaaaaagttcagcaaatcatagattgttatcctgcaaccaaagaagattatgccaaggaatatgatgattatattgttgctattaaaattgttgattcaattgaagaagctatttctcatatttatcaatattctactaagcattcagaatctataatcactgaagatgaacaagcagctgcaaagtttatggattcattagattctgcatgtgtttatcataatgcttctacgcgttttagtgatggtggagaatttggttttggagcggaacttggaattagtacccaaaaattacatgccagaggtcctttaggacttattgagatgacttcatatcaatataaaatttatggagatggtcaagttagaaaataatgtttgtaaaagaatcgatgaatgatgagatatttattgattcttttttgttgaaaaaataaaaagatactttttgttgacaatacttagccgactaactataattgttagtgcactaagtaataaggagtgaacaaagatgaaacatgagaactttagtagaattatggaagaattacggacagtacacaagctttcaacaaaacttgttgcttcacgttttcataatttaacaccagaacaggcaaaactgatgtttttaattcatgataataaaatgaatcaaaaagaaatagctcaaaaacttcatattactgaggcaactctttcagtaagaattaaacgtttggttgattcggggttagtcgaaagagaaattgatagtcaagataagcgcaataataaaattgtcttatcgccgcagggggaagaaacattaaatggtatgcaaaaagagtttgattatgtctatgaagttatttgtcgagaaatgactcaggaagattttgaaactgttttgaatatcattaaaagaatgcaaaaaaatataaaggaggaaatggaatgattaagttgcgtaagtttgcttataaattctggttaccaattcttttatgtattggatgtgtttttatccaatctcaatcagaattggctttaccagattatatgagtaaaattgtaaccaatggaattcaagcaggtggttttgatagtccagttgctgatgtatttagtgatgaaacttttaaacatcttttggtttttgctgatgatgaacaaaagaaaaccattgaatcaagttatacttatacaagttatgaaaacttaaaagataactttaaagaagaattccctaaacttaaaaatgcttatgttttaaatgatctatctaaagatgaaaagagtcaattagagagtgcattaattaaaccaatgttgatggtatcttcaattgattcaatggataaaaattccaaagaatatcaagaaagatttgggaatttaccagctgatatggatatttatcaagtattttcaatgatggatgcgaatactaaaaaggaaatgacaaagaaaattgatacacaaatagatgcgatgggtgaatcaacaatgttgattgctggtggaaatggtgtaaagactgaatatcttgcattaggtgctgatgttgatagtattcaaacacgttatattctttcatccggtttaattatgttagcaattgctttgttaggttcagttgcagcaatgatttctgcctttttatcttcacatgttggggcaggtgtggctagagatttaagaaaggctgtttttgaaaaagttgaaagtttttctaatactgaatttaataaattctcaacagcttcattaatcacgcgtacaacaaatgatattacacaagtacaaatgttaatgattatgttgcttcgtattgttttatttgctccaatgatgggtgttggtgcattatataaagcaattactcattcaacatcaatgacttggattattttgcttattttattagttattagtggcgtattgtttgtcttaattaaggttgttatgcctaagtttaaaattattcaatcattaattgatagattgaacttaacaatgcgtgaaaatctaagtggtgtcttggttattcgtgcttttggtaatgaaaagcatagtgaagatcgctttgatagagccaatgatgatttgacaaaagttaacttatttgttaaccgtgcaatggcgacattaatgccaattatgatgtttattatgaacattgcgactgtgttagttgtttgggttggtgctcaacaattagacttaggaaatattgcgattggggatatgatggcctttatccaatatgcaatgcatattattatgtcattcttatttattgcgatgatctttattatgattcctcgtgcaagtgttgctgctggcagagtttatgaagttttatctactgatttatcaattaaagatccagatgatgcaaaagaatttaatgcatctcaaaaaggattagtggaatttaaagatgtcactttccaatatccaggggctcatgaagctgttttaagtcatattagttttactgctgagcctggtaagacaactgcatttattggttctactggttcaggtaaatcgactttaattaatttaataccacgtttttatgatgttactgaaggtagtgtaacaattgatggggtagatgttagagatgttaaacaacacgatttaagagaattaattggggtcgttccacaaaaaggtgtcttattctcaggaacaattcgttcaaatcttcaatatggtgcacatgatgcaagtgatgaagaattaagcgaagtgattcgtattgcccaagcaaaagaatttgtcgatgataaaccaaaaggattaagtgaagaaatttcacaaggtggaacaaatgtttctggtggtcaaaaacaacgtttagcgattgctagagcattagctaaaaatccagaaatccttatttttgatgatagcttctcagctttagactttaaaaccgatgctattttaagaaaagaattaagtaagctcacagaaaaaactaaaaatacagttttgattgttggtcaaagaattgcatcaattatggatgctgatcaaattattgtattagataaaggaaaaattgttggaaaaggaactcataaggaactgatggaaacttgtcaggtataccaagagattgcttattcacaactttcaaaggaggaattagcagatgcctagaggaccaatgggacgtggtcatggacccgcaacagaaaaagctaaggactttaaaggaacaatcaaaaaattatttgcttacttaaaaccttattatgttaaatttatctttattattatatttgccgctggttcaactgtattttcaatctttggaccaaagattttagccaaagcaactgataaattaagtgaaggtattatggctaaagtcagcaatactggcggaattgattttacagcaatttcacagattttaatttttctagcatgtatttatttattaagtgcattgttaaattatattcaaggatttattacttcaggtatttctcaaagagtggcttatgattttagaaaagcaatttcacaaaagatggatcgtttaccattaagttactttgataaacattcaagtggtgatactttatcacgtgtcacaaatgacgttgatttaatagctcaatcattaaatcaaagtatgacacaaattgtcacttcatcagtcacagttattggtattttcattatgatgttaacaattagtgttccaatgacattaatggcattatgtgttttaccagtttcaatgttcctgatgacaagaatcatgaaaagaacccaaaaatatttctttagacaacaacaaagtttaggaaatgtgaatggtcatattgaagaaatgtatggggctcatcaagttgtcaaagcttttaatggagaagaagattcagttgaaaaatttgaagtttttaataatgatttatatgaatcagcatggaaatctcaattcttctctggtttaatgcaaccattaactaactttgtaggaaacattggatatgttggagtctgtttattaggtggattcctagcatcaggaaatgcgatttcaattggtgatattcaagcctttattcaatatgtccgtcaattcaatcagccaattactcaattagctcaaatcatgaatcaattacaatcaactgcagcagcagctgaacgtgtttttgaatttttagatgaatctgaattggaagaagaaacaccaagaattacgcatgaacaattagctaagattgatggtagtgtaactttcaatcatgttaattttggatataatccagataaaacaattattaatgatttttctatgcatgtgcatgctggacaaactgttgcgattgttggtccaaccggggctggaaaaacaacaattgttaaattattaatgagattctatgaattaaatagtggtaatattttaattgatggtcatgatattaaggattatgcaagaagtgatttaagaagtttatttggtatggttcttcaagatacgtggttatttggtggaacgattagagaaaacttaaaatatggtaagttagatgcgactgatgaagaaatggaaaaagcatgtcaattggcttatgctgatcactttatcaacacattagaagatggttatgatactgtgattaatgaggaatcaaataatatttctcaaggtcaaaaacaattattaacaattgcaagagcattcttagctgatccaaaaatcttgattttagatgaagcaacttcttcagttgataccagaacagaagtcttaattcaaaaaggtatggataagttaatggaaggtcgtacaagcttcattattgcccatcgtctttctacaattcgtgatgcgaatacgattattgttatgagagatggagacattgttgaacttggtaaccatgaatcattacttgcaaaaggtggcttctatgctgacttatatcaatcacaatttgaatcaagtaaagaagatgaataaaaaaaagagtttgtagagaaattttacaaactcttttctttatataaattttgaatcatttctatttgtcttgtttcactttctatttcacctagataaggatgagtgagacatgctttatgaaattgttccaagatttttttagcttttactggattatggcatgataacaattggtaagcatattcaatttataaagttgtgagctcacgtttaagaagtttagtcatttttaaatattttttatctcttatattattaattttaggattttgtggatctgtgaggataagaatataaagaacgatgtttttgagaagataaatcgtattatcttccatttgaatattttgattcaaaatatgatcagctgtatcataggctttttgatagtgagataaatcaatttctcttagacaatagaaagcagtgatactcatacaaagattatgtgttaagtcttcattggaatagattgtaaagttgtcttcattgatatcttttaaggaatatcctttactcatatattcaataattttgagttgttgaaaacaagcatattttgtgattgggtatttcatcatattgaaaacatttttagcatcattatctattcctatattgagtggaagtccattggttagagcactgatcaatccaaatataccaagactaaaacagaacgattgtaaatagggattatggataattaagcatataataaaggaaatgagtgcagaaataagattgttaaaaacaccaccaagatgataaagaacaaaaggaaaaggctcttgataatggtcaatactcatcagacattgaccaagtgttccaggaactttatttatcttaaatacaattttatcattcctttttacccacatgaaattatagaaacgaatagataaaaattgatagcctgataataatccaaaaatcaaatgaccacattcatgaataatgacttgaagaaagatacatatataaaaagctccaagaacgtaaaaagcagtgataattgataaatcataatctttaaaaaaagcaataccaaaatatccacacattcctccagcaattaaatataaaacaaaaataaaaaattgactaaaaaactttttcataaattaacctcacacattatttttttcttattataacatagttcttgaaaatgatatatctctttattgtaaagataattataaaaaatactttacaaataaaaagatttgttgtattcttaggaaccaaggaggttatcaaatgaaaacaaaagatatgtgtttatatgctttatttgctgtactgattggagtaggagcgtttatcaagttaccaatttctattgtaccagtaacattacaaacattgtttgtgatattggctgctttgatattaaaagaaaaagcagtttatagtgtgttattatatattggcattggattattaggaattccagtgtttgccagtggtgggggaatctcttatgtgcttgttccttcatttgggtatttgattgggtttgttgtttgtgcctattttgtaggacactttcaataccaaaattatatcaaaacatttattgtctgtttaatagggatgttattgatttatttgattgggatgttgtattttgctttgcttcaatatttctattatggacaaagttatcctgttatgtttttaataacaagtttatttcttgtttatattccaggggatcttttatcagtcattgctgcaattgttatttatgaaagattacaagcatatgtgcctaaaaagatgctttatgaatagttagtataaaaatataagatagaaaaagaggacttatttaaatgagatggagaaatccatctttttctttatctaaaaacttaaaaaataatatataaaattttttaaataaatttcataaaaagtatttacaaatcaaaaaaagaggtatatactagcattacttcaaaaatttgaagtaagaaattaaaaagttttaagtaaataaacatataggaggaaatataaatgtttgaacaagtgaaagatgcattagtagaatcattaaatattgaaggagaagatattaaattagaatctaacttaaaagatgatttaggaattgattcattagctgcagttgaattatctttagatttagaaactgaatttgatgttgaaatcagtgatgaagaattagctgctttagttacagttgaagatatcgtgaaattaattgaatctaaacaataagctaagttatcttagcttatttttctaaggaggaaaatttatggatacagaaaaaatcaaatcaatcatgaaaatgtttgaagaaagtcaaatttcaaaaatggacttaactgatggtgatttgcatatcactttagaaaaagaaatggaaccagtggaagttgtaaaaacaataaagagtacacctattcaagaagttgaagaagtaaaacaagaacaaggaacagcaattacgagtccacttgtaggaacatattatcaagccagtggaacaaatcaagaaccatttgtgaaagttggtcaacacattcaagagggagataccgtttgtattattgaagcgatgaaagtgatgaatgaaattaaagcgacagtgagtggaacagttttatctatcaatgtaagtgatggagaaacagttgaatatgatcaagttttaatgatgatagggtaaggtgaaatcatgattgaaaaattattaattgcgaatcgtggtgaaattgctgttagaattataagaacatgtaaagaaatgggaattcaaagtgttgctgtttattcaacagctgataagtcatcattacatgttcagcttgctgatgaagctgtttgtattggtggacctttagccaatgaatcttatttgaatatgaatgcgattattcaagcagcttgcaatactggttgtgatgcaattcatccaggatttggattcttaagtgaaaatagtcaatttgctagactcgttattcaatgtggattgatttgggttggaccatctcctgaaattattgatatgttaggaaataaagcacaagctagaaaactgatgaaagaagctggtgttcctgtgattcctggttctaaagaaattattgattctttacaacatggaaagaaaattgctgatgaattaggatatcctgtgatgattaaagcaagcaatggcggtggtggtagaggtatgcgtattattcgtcatgaagatgaatttgaaacgcaataccaaaatgcgaaatcagaagcgaaagcatgttttggtgatgatgatgtttatttagaaaaatatatagaaaatcctaaacatattgaagttcaagttgttggagatcaatatgggcatgtgattcacttgtttgaacgtgattgttctttccaaagacgtcatcaaaagatgattgaagaagcaccttgtcatattctaaaaaaagaaatcagagaaaaattatttgaagatgctctgaaggcttgtcatcatgtcggttataacagtgttggaacaattgagtttcttttagataaacatggaaattattattttatggaaatgaataccagaattcaagtggaacatcccattacagaaatgatttgtggtattgatttaatcaaattacagttaaagatggcagaaggtttaaagatgccttatcaacaagcagatattaaacaaaatggctatgcaatagagtgtcgtatcaatgctgaagatatgaatagagattttgcaccaacacctggaaaaatcacttttatgcatattccaggaggacgtggaatccgtgttgatagtgctatgtataatggttgtgttatttcaccatattatgattcaatgattttaaaattgattacatttgcgccaacacgtcttgaatgtattaaaaaaatgcgtgcagcattaagtgaagttattattgatggaatttctaccaatacaaaattccattactatgtcttacatgcgaaagactttattgatggaagttatgatacaggattttgtgaaaactttataaaggagttgaaagagaatggatcaattgtttaaaaaaagaaaccaagaattaaaagaattttcaacttggttaaaaagacataaacccaaagcaaaaaaagaagtacccgataatatttttaaacaatgtgatgcttgtcatcaatcaattccttattttaccttagtagaaaatgattatgtttgtccacattgtggaaatcatatgaaaatcagtgctagacaaagaattcgtgatcttgttgatgaaggtagctggcgtgaatattttcaaagagatatttctaaaaatattgaagattttcctggttatgatcaaaaacttcaaaaagccaagatgtcaactggtatgaatgaagcggtgatttgtggaattgggcaaattgatcatcaaaaggtagttttatgtattatggattctcgttttatgatgggaagtatggggaaagtcgttggtgaaaaaatctgtaaaggtgtagagctagcaatacgtaaaaagttgcctttgattattagttgtaccagtggtggtgcacgtatgcaagagggaattgattctttaatgcaaatggcaaaagtttcaagtgcattaaaaagattttcaaatcttggaggcttttatatcactctactaacccatccaacaacgggtggtgtaagtgcaagttttgctatgctaggggatattattattgctgaacctcatgcattagttggatttgctggaaagcgtgttattgaaaaaacaatgaagcaggaattacctgaaggttttcaaacagctgagtttttattagataagggatttatagatatgattgttgaaagaaaagatttaaagaaagttttctcagatttactgagaatgcatggaggtcgctcatgaatatagttgaaaatgaaagaaaaatcaaagaactccaagcacgtgttttgacactggaacctggtcaagaatatgacacattaacaaaacaaatcgatgaattaatcaaagaaacttatgaaaatctttctgcatgggatcgtgtcactctcgcaagagatccatcacgtcctaaggcaagtgattttattgaaggattgtttcatgatttttatgaattccatggggatcgttgttttggagatgatcatgcgatgattgggggaattgcatattttcatgacaaaccagtgacagtgattgctcaagctaaaggaaaatctttgcaagaaaatttagagagaaattttggaatgtgtaatcctgaaggttatcgtaaagcccttcgtcttgcaaaacaagctgaaaaatttcatcgtccaattattacttttgttgatacggctggggcatatccaggaattgaagcagaggaaagaggtcaagcacaagccattgctgaatgtttatatacattttctgatttaaaaacaccagtgatttgtgttgtactttcagaaggtggaagtgggggagccttagcattaagtgttgctgatcgtatttgtatgatggaaaatgcaatttattctgtgttatcaccagaaggatttgctagtattttatggaaagatgaaacaagagctcaagaagctgctgaagtgatgaaattaacatcatatgatttgtatcaaaaaggaattattgattatttagtgaaagaaccaacaggtggtatgcaaaatgatttaaaacttgttttacatgatttagatcgttatttgacacaggaacttgaaaagcttgaaaatatgaaagaaaaagatatgttagaaaaacgttatcaaaaatttcgtgaaatgggaagaatgtcatgaatcaaataaaaatattaggtagtggtatagccaaagccaatcaaaaaattacaaactttgatttagaaaaaagagttgatacaagtgatgaatggattgttcaaagaacaggaatatcatcacgctatgtaagtgttggtgaaaatacgagtgatttggcagttcgtgctgcattgcaggcaattgataatgcgcaaattcaaaaagaggatattgatgtgattattgttgcgacaatgacacctgattgtatgactccatctactgcttgtttggtgcaagcaaaattaggattaaatgattatcccattttggcttttgatttaaatgctgcatgtagtggtttcttatatgcttttcaagttgcaagtgatttgttaaatcgttatcaaaatattttggtgattggtagtgaaacattaagtaaaatgattgattggaatgatcgcagtacatgtgtcttatttggggatggggcaggtgctgtcattatgagtcgaggacaatcaaaattgtatcactatgccaatagtgaaggagatttaaatggtgttttaaaggctgaaggattaccacttattgaacatttagaaaatcatcagccaattcaaagttttttaacaatgcagggaaatgatgtgtttagatttgcagtgagggttttaaaagaatcaattgaacaagtcttagaacttgctcaattatcaatagatgatatcgacttgattattcctcatcaagccaatttacgtattattaatcatgttgctaaaaaaatgaaagtggatatttcaaagttctatgtcaatttacaagactatggaaatacatcagcagcgagtattcctattgcctatgctttggcaagacaagaaggactgattgatgagcataagcgtattattcttgtaggatttggctcaggattgacatatggagcaacattgattgataaagcaggaggagaaaatgatgttaaataaattattaaatataaaatatcccattattcaaggggccatggccaatattgcaactgctcagtttgcatcttgtgtgtctaactgtggcggacttgggattattgcaacaggttcattaaatggagaacaaacacgcgcacagattcaagaatgtaaacaacttacagacaagccatttggtgtcaatattatgttgatgaatccttatgcgtcagaaatcgttgatgtcattgttgaagaaggtgttgcagtggtgacaacgggagcaggtaatcctggaccttatatggaaaagttaaaaagtgctggaattaaagtttttccagttgttccaagtgttggtttggccaaaagaatggaacgtgctggggctgatgcattgattgtagaaggtggcgaatctggtggacatgttggtgaaatgacaaccatggcattattaccacaagttgtagatgctgttaatattccagtgattgcagctggaggaattggtgatggtcgaggaatggtggccgcactagcattaggtgcctgtggtgttcaagttggaacatgtttattggtagctgatgaatgtccaattcatgacaattataaagaagcagttatcaaagcaaaagatacagatactgtagtgacagggaaaagtgttaatacacctgttcgtattttaaagaatcagatggcaagacaatatttaaaattagaaggtcattttgaaagtcgtgaagaattagaaaaattgacattaggtggtttacgtaaagctgttcaagatggtgatatgaaaacaggttcagtgatgatgggtcaaattgcaggaatgattaaagaaaaaaagccaatgcaacaaatcttagatgacatgatgtcatcagcacaagttgcctatcaaaagttaagtcatgttatggaggaaatctaaatgattcaaattcaagataaatacttagacattcctcttattcaaggtggaatgggagttggtgtttctttatcatcactggcaggacatgtcgcaatgtgtggtggaatgggtgtcattagtgctgctcatccgggctatctttatgaaggttttcgccaaaatcctatcgcaacaaattgccaagcaattaaagatcatatcaaacgtgctaaagagattgctcaaggtcatgggttgattggtgtgaatattatggtcgcaggacagggttatgaagatcttgttaaagcttctgttgatggaggatgtgatgcgattatttcgggggctggacttccgttagatttaccgaaatatgccaaaggaaaaaccttgttagcaccaattgtctcaagtggaaaagcagcaagattaattgcgagagtctgggaaaaacgttatcaatatacacctgactttgtagttattgaaggtagtgaagcgggaggacatttaggttttaaaaaagaaaatctgttaaatggaacttgccagacattgagtgaaatcttagcagatgtgaaaaaagaattaaaaccttttgaggaaaaatttaaaaagatgattcctatttttgtcgcaggaggtattgattcaggaaagaaaattgcccagtttattcatttaggagcaaccggtgtccaaatcgcaacaccttttatcgcaacttatgaatgtgatgcctctcaggcttttaaagatgctgtcattcaagcatgtgatgaagatattgaaatagtgaaaagtccaacaggttttccaggtcgtgccattgtgaatgagtttgtgaaaaagacacgaaagacaggcaatatcacaatgaaaaattgtcttcactgtatgattccatgtacaccagaagatacaccttattgtataagcgaagccttaattcaaagtgttaaaggcaatgttgaaaatggattggtttttgttggaacacaagctgctaaaatcacaaaaatgaaacatgtcaatgaattgattcaagagtatatgaatgaaatggaggaatatctatgaaattaggatttatctttgctgggcaaggtgctcaatatgtgggaatgggaaaagaactttatgaacaatatgaagtggctagagacgttttcaatcaagcacatattgatattgatgtcaaaaaagtttgttttgaaggaccagaagatattttaaatgaaacatcttatgcacaaccttgtttattaacaacttcactagcaattgcacgtgttattgaatcctatggtattcatcctgattatgtggctggactttctttaggagaatattcggctttaacatatgctggggcatttgatcttcaagatgccattgcgattgtaagacgtagaggtcaattgatgagtgaagctttaccagcaggaacgacttcaatggcagctgttttagcaatggatgccagtcgcattgaagatgttattaaagatatagatgatgtgacaattgcaaactataattgtcctggacaaattgttattactgggaaaaaagaagccgttgaaaaagcaacagaaaaattaaaagaagctggagcaaagcgtgtaattcctttaaaggtttcaggagctttccattcaccattacttgaagatgcttcaatgaaattaaaagcagaattagaaaaatatgatattcatcaaccacaaattccggttgtttacaatatttctggaaaagaagaagatggaaatcttattgatattttaaccaaacaaatcaaatcaagtgtctatttttatcaatcacttcaatacatgattgctcatggggttgaagcctttgtggaaataggtccaggcaaagccttaagtgcatttgtgaaaaaaacagataaaacaattcctgtttatagtgttgatagtatagaaagtttaaatcaattgttaggagcgttgaaagatgaataaagttgcagtgattaccggagcggcgcgtggtattggaaaagcgattgcgcttaagtttgcaagtcaaggatatcatgtcgtgatcaattatcgtggaagtgaagaaaaagccaatgctgttaaagaacagtgcatagcattaggtgtagaagcattgacttatcaaggtgatgtcagtcactatcaagaaatggaagatatgatgaaagctgtcatggaaaaatttggacgtattgatgtgttagtcaataattcagggattaccaaggatcagttattattaaaaatggatagtgaatcatttatggatgtaattgatgtgaatttaaaaggcactttcaatacaatcaaagctgtcagtcgaattatgatgaaacaaaaatctggagtgattatcaatatgtctagtgtgattggtgaaattggtaatgctggtcaagccaattatgcagcgagtaaagctggtgttttaggcttaacaaaatcaattgccaaggaatttgccccacgtcatattcgtgtcaatgcgattgctccaggatttattgcaactgatatgacagatgttttaaatgaacaaacaaaagaaaatatcttacaagccattcctttaaaatcattaggtgaggctgaagatgtcgctaacgttgcttattttttagcaagtgatgatgcgaaatatataacaggccaagtcattaatgtagatggtggcatggtgatgtaaggaggaaacaagaatgaaaaaaagagtagtaattacaggaatgggagttgtttcacccattggaaatacagttgatgaaatgtggaatagtattactcatcaaatctgtggaattgatgaaattacgcattttaatacaactgattataaagtcaaattagcaggtgaagttaaaaatcttgatagtgaatactattttagtaaacgtgaattaaagtttaatgatcgttttacacaatttgcaagaattgtatctaaacaagcaattgaaaatgcaaatcttgatttagaaacaatcaataaagatcgttttggagtgattattggttctggaattggtggtgtagaatccattgaaaaagcagaacaaactttattcaatcgtggtccatcaaaagtttctccttattttataccaatgactttaattaatttagcagctggaagtgtagctattgatttaggagccaaaggacatgtttcatctgttgttacagcatgtgcagctggaacaaatgcaattggtgaagcatttcataaaattagagatggttatgaagatgtgatgattgctggaggaagtgaagcttctattacaccattagcagttgcgggatttgcttcaatgaaagctttgcatactggtgtagataagaatcgtgcttcgattccttttgatcaagaacgtagtggctttgttatgggtgaaggagcagcagttcttgtattagaagatttacaacatgctttgaatcgtggtgcaaaaatctatggtgaaattgttggctatggagcaacttgtgatgcttatcatatgactgccccattatctgatggaagtggtggtggaaaagcaatgaagaatgctttagctgatgcttcattaaaaccaagtgaaattgattatatcaatgcgcatggaacaagtacacctttaaacgataaaacagaaactgctgcagttaaatatgcttttggtgatcatgcctatactttagccatgtcatcaacaaaatcatatacaggacatcttttaggtgccagtggtgctttagaatctgttatttgtttaaaagctttagaagatggttatattccagcgactattcattatcaaaataaagatgaagaatgtgatttagatattgttgctaatgttggaagaaatcaagacattcattatgccatgaacaattcattaggttttggtggtcataatgcttcattaatatttaaaaaatgggaggaagaataatgttatataattctaatgaaattcaaaaaatcattcctcaccgctatccttttttattggtagattgtattgaaagtattagtgaagatggaaaaacaattgttgggagaaaatgtgtgactgctaatgaaatgcagtttttaggacactttcctgataaacatgtaatgccaggtgttttaattattgaagcccttgctcaaacaggttgtgttttgttattgtcaaaagaagaaaacaaaggaaaaattgctttctttgccggtattaataaagctagatttaaaagacaagtcattcctggagatgttttaactatgactgtcactttgacaaaagaaaaaggtggcatttattttgccaccatccaagcgaaagttgaagatgaaattgcagtaactggtgagattatgtgtgctgtgggggaataaccttacgaatagacacttcaccagactgtaagattttctcttgaccatcaacgattaatgttaaacttgcatcatcgttaattgcagacacataagcaggatattgctgattgttttcataaaccatgatgtcttgatgtaaaacataggaatgttgtcgataggtttcaagaaaagatagacttgataattttgaataatcatcatagaagaaatttaaaaaatctatgatgattttttgtcttggaacaaacaaatcgcattgatcttcaagacaacccgcaatcccttgtaaatcctctggcatatcatagtgatggacattgattccaacccctacaatcatactctcaagacgagctgtattcatttctaaacttgcttcacataaaataccacagacttttaaatcatttaaaataatatcattcacccatttgatttggggaaataaaggataattcttttgaatagctttgacaactgctaccccacaacaagctgtaatcttaagcgaatcataaatcgttaaatcaggttttaacatcaatgataaataaatacccttttgacaaggtgaatgaaaacttctgccattacgacctttaccacttgtttgttgattagcaataatgatatctccttgttgaaaatcatgtgttttcatatattgattggttgaatcaatctcatcaaaataatgaatatcttgataaaaacttggtattttctccttgatttgctcaataaaaattacatcattctcaagtgttaaacaatatcctttctttgtagatgtttgaatatgatagcctttctcttttagttttttgatttgtgtagatattgtcattcttgaaacatgtaattcttcactgatttgttggccagaaatataatgaccttgatgtttttgtaatatttcgagtaatttcttttccatgagcacattatactgcacagtttcaaaattatcaagaatatcaaagtcatgggttaagatttagagttgttaaggagcatcaaattgtttctggtgcatattctgatatttattatcatcatcttgctttagcgactatatgtagtgttctattgattttaaaatgttacaaaatcatttatatccgtcttgtgatgcttaaaataagtatgacatcgtagatatgaatatatgattgtaatgtgatattgtccttattaggtaaattttaacaataaagataatattgtataatagcttaagtataagtgagggaaaaatatgaaattaagctatcaagttggacaaaaaccattatggagtcaactctacgatatattagaaatgcgtatattaagtggtgaatataaagaaggggatactttacctagcgaagttgctattatgcaagaatttgatgtttcaagaataacagtgagacaagctatggataaattaattcaagctcaattgatttctcgtcaaagaggcaaggggactgttgttttaaagtataaaaataaagtgacaacagcttttcaatcttcttttcaagaagtaaaagaaaagaatcaattaaaagatcgacaagttatagcagttgaatctgtaaaagctcctagtgaagttgcatatttttttgatattcctacgtctgattcagttataaaactaacccgacaaacttttattaatgaagaagttgttgcttgttatgaaacctatctgcatccacttgttccattgacagttcaggatgattttaaaggttctttgtatacaaaattagaaatagcatcttatcctataacaaatgttatagaaaaaatatcagccgcactaataagtacacaagaaaaaaagatattttcaattgagcaagatgaagcagtaatgcatcgtatacgaatgggatattcgcatgatctggcaatcgaatatacatatgcgacttatcttgctagaggatatgaattaataatagatttaaaataataaagtttatcaacatatgatgatgtgttggtagactttattttcttcttgataaaatgttatgacattgtgatgttattattgcaaatcagcaagataagtactataataatattgtaatgttatgactatataaatatataatttattgctataacaaatcttggaaatataaaataaaagaaaattttaatgaataatataaatttttgtatcatcatattttgatagacaatgcatacacatttttattcatcataaattatagatgtagggttttaagagttgagtttaatgaaaaaatatatcttctaaaatgatatcttattcaacattcattatcttttcattaaactcactccctaattttgaggttagttagtttgtaaagacaattgttttaaacgatatgcctattacataaagaaatagaggtgataaacaaagaaagacggcaagacaaaattgaataatattattgaaaaagaggaggaagtatatcatgaaaaaatttttaaaggtcttgttagcaggtgttttagtgtcaggagcactcgttggatgctcacaatcagattctaaagatgcaggaaaggttgttatttattcaccaaatactgaaaatgaagtgaatagtattattccagcatttgaagaatcaacaggtattaaggtagaattggtacaaggaaaaactggagaaatggtaactcgtattgattcagaaaagggaaatcctcaagcagatattctttggggtggaatgaatttaggggtttatacaacaaatcctgatctatgggaaaaatatgtttcacctaatgaaaatttgattgatgaaaattatcgtaatacaactggatattttactaattatttattatctggttcaggatgttttatcttaaataataagttaataaaagaattaggtgtagaagtaaaaggttataaagatttattaaatccaaaattaaaaggaaaaattgcttcaggtgatccaacttcatcatcaagtgcttgggctgaattaacaaatatgttacttgttatgggtgaaaagaagtatgatgataaagcttgggattatgtaaaagattttgttaaacaattagatggtgtagaattatcaagttcttcagctgtttataaaggtgttgctgaaggtgaatatgcagtcggtgtttcttatgaagatccttgcgtttcattacttcaagatggtgctgatgtcacagttgtttatccagaagaaggtgcggtttggttaccagctgccgctgctgtgattaaaggagcaccaaatatggaacaagctaaaaaatttattgacttccttatctctgatgaatgtcaaaaaattattagtggattaacagtacgtggaacaaatacaaagatgaaatctactaataaatatatgaaaccaatgtctgaaattaacgtagcttatgaagatattaaatattgtgctgatcacaaaactgaatggcaagctaaatatgcagaaataaaacgatcagtcaaataaaaatgaagattggagaaaatatatgagcgtcgaaattaaaattaataatgccattaaaagatatggtgataatacaattattggcgatctttctttagatgtcagggagggtgaatttttcactctccttggaccatctggatgtgggaaaacaacattattacgtatgattgctggctttaattctattgaaggtggagatttttattttaatgataagagaatcaatgatattgatccagctaaaagaaatattggaatggtttttcaaaactatgcgatttttcctcatttaacagtcaaagataatgtcgcttttggtttgaaaaataaaaaagttcctaaagaacaaattgaagttgaaacaactaagtttatgaagttaatgcatattgatcaatatgctgatcgtttaccagaaagattatcaggtggtcaacaacaacgtgttgctttagcaagagcacttgtcattcaacctgatgttttgttgatggatgaaccattaagtaacctagatgcaaagctacgtgttgaaatgcgtacagtcattaaacagattcaaaataatgttggaattacaactgtttatgtgactcatgatcaagaagaagcaatggctgttagtgatcgtattgctgttatgaaagatggagatattcaacatattggaacacctaaaaatatttatcaaagaccagctaatttatttgtttctacatttattggtagaacaaatgttttaaagggtcaattggttataaaagatgaaaaatgttatttaaaattaactgatgattatatggttttaatggataatattaaaaccgaagaacaaaaagacatgaatgttgtagcatcaattagaccagaagaatttgttattcataccaatcatcatgaaggattaaaggcgattgtcgatgagagtattttcttggggttaaatactcattatcttgtacgtagtgaagatggtgaggaatatgaaattattcaagaatcgaagattgatagtattattgaaaaaggaactgaaatttatttaacagttaaatctgaaaaaattaatatttttaatgaggatggtagtcgtaatatattaaatggagttcaaaatgatggtgaacagtattttaagaaaaaggaataggtgataaatatggataaaaataaaaagaaatttgatgtctggcatgttattacaatttcacttattgctttatatgctttatttttgctctatccattattttgcatacttaaagaatctattattgcaaatggaaagttcactgttgaatattttattgaatttttcagtaaatcatattattttgaaactcttatcaattcttttgttgtatcagtatgtgccactgttgtcactttaattattggtgttccccttgcatatttttataatatgtatgaaattaaaggaaaatcaatcattcaaattattattattttatgttgtatgtcagcaccgtttattggggcatattcttggatacttttattaggacgttctggcttgctgacaaatttaataaaatctcttactggttttacaatgcctagtatttatggatttaaaggtattttacttgttttatctttacaactctatccattagttttcttatatgtttcaggagccttaaagaatattgataattctttgttggaagcatcagaaaatatgggctgttcaggggttcgtcgtttttttaagattattgtgcctttatgtatgcctacaatattagcttctacgcttttggtatttatgcgtgcttttgctgactttgggacaccattattgattggtgaagggtataagactttccccgttgaaatttataatcagtattttggtgaagtcggaacaaatcataattttgcggcagcaatttcagttattgcaattattattacagcgattatcttcttggctcaaaaatgggcaagtaatcattattcatttaaaatgaattctttacattctgtagaacgtaaaaaagctcatggtatttctaatattttaatgcatatttatgtttattttattgttgggattgcttttttaccacaaatttatgttatgtatacatcgtttttaaagacaagaggatatatttttgttggtggatattcattagatagttataagcggattgctggtgatttatggaatgcaattggaaatacattcctgattggtgggattgcgttaatatttattattgttgttgcgatattgattgcatatcttgtagtgcgtaggagaaatttaatgaataatattattgatactttatcaatggttccttatattattcctggttcggttgttgggattgccttggtcattgcttttaaccgtccacctctggttttaacaggttcagcaattattatgatcatagccttaattattagacgacttccttatacaattcgttcatcagtagccatattacaacaaatcccaatgacggttgaagaagccgctatatcattaggatgttcaaaattacaagccttttttaaagtaactgttccaatgatggcaaatggaattctttcaggagctattttgagttgggttacgattattactgaattatcaacagcgattattctttataatcgtagtaccattactttgacattatcaatctatgttcaagtctctcgtggttcatatggaacagctgcagcttatgcaacagtattgaatttaattactattctgtcattactgatatttatgaaattatcaaaaacaaaagaaattgccttttagttatggagtactcattttgaaaatgggtacttttattttggataaactatacattttgactaaataagagtaaaatagaatgtgtaagggggaatgaacaatggctacatatgaagatgctttggatattgtgactttgcatgcaagtgaaataatagcacgttctgatacggatcagattgtatctgatttatatattgttatgagtgaaaagtgtgaaagtggctcattattgaataatcttaatgggattgaaagaattttttatttgtgctgtaattttgatgaagcaatgaaaaatggtggaattggtgaattttatcgtcaggattctggaaattttgcgaatgagacagttgaagcattattagaaataggggctaaaaattctgccttgattttagataagggaaatggtgtttttaaagaaggtgttgttccagaggataaactggcacgcattgaggaattggatagtcttgatattaatgatatttcatggttatttgatgaattggatagagaattttcgttgcatcaagataatcttaatgaattgaacttacgatatgttttggctaataaagaagcttttatgtaatggtaatgattgtttttttataaaaatgtctatataatgaaaatgaggtgaataaaaatggattattttgacaagattaaagagagattagcatctaaattaaaaggaaaagaattaactaaggattcctcatttaaagatttagggattgattctttagatttagtagatttagtttttgaattagaagaagaaattggtgttgaatttgaagataatgaattgatgcaaattaaaaccgttcaaaatttattagatttaattgattctaaaaaataggggatagtatcctctatttttgtttaggaggcgaaaaaaatgatatatcaagttgataatcagaaattaaaagtcaagattcaagatattcaagatgatcatatgtatatagcaatgatgtcattagatgaattaaagacatgttatagagagtatcatattactgaaagatcgttattgcgttgtgaggagacatcaatgttgaatcaaaatattattattcctcatcgacaatattactatggtcttattaatttgattaatgcgagagatgtttttgtaaaaaaagattcattagcctttttcatttttaagaatttatttttagtcgttgtgattgatgatgaagatcatcatattagtgaagtctttcaatcatcaagtgactatgtattagaaaaaggtgtttccattacgcgcttggtttattattttttaagtgaattgatttcaagagattatcaatatattgaggatcttcaagaagaaattgaggatttagagagtcatgatagtgaagaagaatctattcattttacgaatcaattaagacaattaagtaaagaattattattgttaaggaattattatgataatcttgttattattggggaagatttacaaatgaatcatcatcatattttcgaagatgatgatatgcgatattttgaaatctttacccgaagaattgagcgtctttctaataatgttcaaatgcttagagagttattgagtcaagcttatgaggctcatcagtctaaattggattataaattaaataagacaatgcagttttttactgtagtaacaactgtttttatgccattaacattaattgctggctggtatggaatgaattttaagaatatgcctgagttatcaagtccatatggatatttgagtgttattttagtgagtgtgagtgttgttgttttattgatgttgtggtttaaaaagaaaaaatttctatagaaaaagaagcgtgttatgaacgcttctttcagattgttgacaaagtggtaacttttaaaaagttgctacttttttcttttacttttttattataatttctttttcgcttattaatagtcttatttatatcgagaaagatgcctctctttgaagcatttttcattattcttttcttcattcttgccagttttcctaaattatggcacccaaaaataatcaacgattcatgttgattttttttaagccctcttactcttgtaaatcttaagcaatgcttttccttgcaatctgcatataccctttctattgtttctttcctcaatggatatatttccttccactttggagtataccttatttcatttgcttcttctttatattcttcccacacatgtctcataatgactttctgatgatttttactttgtgtgcatttctctcttaatggacatgtttcacaatcttttggatttgacttatattccttatatcccgacttgtttgttgttgtataaacgagatcttttatatttggacagatataaatatcaagcttttcatcatatacatattcatgcttcttgaagaatcccttttttgtcattggtcttttatatgggaaatatggaacttttcctccatccaatacttctttgcatattgcaggtgtgacaaaccctgcatcaagacttacattttgaattgattcaccatatgtttctaacaatttttgataagcatcatgaaaaacaacgctatcatgcagattccctggcgctacagtattgtgaagcacaaatccatgtctatcacagaatgttaaatttgtatatgcaaagcatttttgtttctctcccttatgaaagcatccactttctggatcagtcgtgcttactttgattgatttcgttccttttccttcaattaattcgccagtttcttcgtcaaatgccaattctatatcttctgtcttcttgagttctttctttccatgactttttctgtcttcattgatttcttttaataattcatcatcgtaatgtttctttgcaatttcaacaactctattttcatgctttctattgtttgcatttgccttcctatgtgtcccatcgccaaaaactgtttcaaggtcaacaaaatcatatgcaattgcctcttttaaaatgcgagtgaatatcttatcaaatatttctgattcaccatatcttcttatataattctgagaccatgttgaataatctggaaccttatcctcaatagataaacctaagaaccatctatatgcaagattaacttctatttctttgcatgttcttctcattgaattgattccaaatgtaaaattaatgaaaatcattttaaaaagtatcactggatctatgctgggtctgccaaacaagctatatagtggtcttgcctctggatagataaaattccagtcaatagcttcttcaagttctctcactttgtgatcctgtggtactaattcatcaatcgtactgaaaataaaacagtctttttttctattgtttaaacatgtcattgccatataatatttctcctattcaatccatctatattatatcatatttgagtataaaaaaagacaaaaagagccataagttttggattgaatagtcgtctttttgtcttaaatattttatcatacttcccaacaaaagaaaagactgttgacacatttactttgtcaacagcctgaaagaagcgtgttatgaacgcttctttattttataaatgattctattggcatatggaatagctgcaagttcttcaggatgatcagcatataagtaaaagataattacaaaataaacaatgatgccaatgacaactgataagattaacggaataaagactttttttgttagcgtaaagagtccatagtaaataagaccaacaatgactcccattgctaaggaggctaataaaggtagtaaatatgtacgtcttatttcttgtttataatgaactttatgacgcaaggctttttgatttaaataacaaacttgtaaaccatagaaacaattaccaataactaaagaatataaacctaaaggtgtaaagattaataaaacaaatgtaataatgcaatgccatattaaagctatagcagcattttttagtggaatatttacttcaccaattgcctgtaagattccattggtaagtgtcgataagccaaagaaaacaactccaggactaccaactgctaataaaattgttgccagctgtaaggtgtctttttgtggaaagaggatacccatgattggaaatgcaagaacactcattccaacagctgaaggaattaagaccatcattgttactcgaatgcctgaacgaatgtgttctttagtttctttataatttttaatagcccatgaagatgaaatagctggtattgcagctgttgacatagctgaagctaatgcaaccggaacattttgtaaaacaatatattcgccagaataaacgccaaacatagttacagcttcaacccctgtacccatagcataatagtaaatgtacatatcaattgttgtaacaagattatagatacatgttgcaaagataattggagtaacaatatttaaaatcattctaaagatacttttataggaatcttcataatcatcaggatcatttttaacaattaaattattcttacgttttaaatacataagagtcatataaattagaccaattaaaacaccaaccccagttcctagggcacttccagctgctcctattgaagctaattggctccctccaacacttaaataaggttgaatgaataaataagctgcaccaacagaaacaattgcattaaagacttgttcaataatttgtgaaatagaagtatagacagtcgtttgatgagcttggaaataacctctaaagactcctaataatcctgataagaaaattgtaggacatagaacccttaaagccataacagcatttttaggaacgataaaaggcgcaataaaaaatgcaacaatagcggctcccccaccaatggcacaaatataaataaaagaacatcttaagatcttttgaacattattatattgatttaaaactaatttttcagaaataagcttggaaatagcagttggtatactataggatgagattaataaaatcaaagcataaatattatatgctgtagaataatacccaattccttcagttgaaattaaagatgtcaatgggcttctatataaaacacctataatacgtacaagtataccagcgacagctaaaatagatgcttgtttaactacggaacgtgttcgattcatactggacctcgctttctacagtgtctattataacattaatttctataaaatcaaaaatcatttcatattatatcattttcgctatttttcatatcttttccacacgactttgttacaatacatacgataaataaggagggataaatgtgaaacataaatcttttcgtatagtttgtgttgttttaagcttaattatttttataagtggaatttattttggttatcattatttttttgataatgatgtcattgattatggagtttctattggaacatgttatatcccaacttatcatagtacaacgcaaaaatcattaaaaacgcaagaagatcagcacatgaatatcattgctattggaaatagtgatttatatagtgcttttcaaccccttcaattatggcatgaacaaaaattaacatcagctattttggccgaagccaatacaaatatgcgtacagcttattatatattaaaagaaagtttgaaatatcaaaaaccagaattgattattttagaagttgatcagttttttgaagaaaaagaattaaacaatgaacaacgtgatttcaaaattgctcatcaatatattgatgaggtattaattcataataaggcagtaaaagttaaaaataaatatttaaaattacatggttattattataaggatcatgttgttcaatataaaaaacaattttcatatatgcaacaaacaaagtacaaagcacaagtcaacaaacatgtcaaaacatatttgccacaatttgttgatctggctaaagaaaatcaatgtcaaattctttttgtgtcttttccttcagcatcttcttggagttatcgtaaacataatgctgttcaggaatatgctcagcaatatggaatcccttttattgattttaatacagatacacaattaactgattttaattggttaacggatagtcgtgatggagggaatcatttgaattattcaggtgcaaagaaaatgacaaaatatttaggtgaatatttaaaagagcattatcaatttttagaacatcaaaatgaaaaagataatcagaaatgggataaggaatatgaagattttctaaaaatattataggaatgtaagacggtttttttgaaaaagtcaaaaataagatgaatatgtaattttggtatactcttacgataaatatgtgttataatatttaaaaatatatcttggaggagaaatatgagcgaaagtcgaatttgtattgctttagattttcaaacaaaggaagaagttaaagaatttttagatcagtttggaaatgaaaaactttatgtaaaagttggaatggaacttttctatggtgaaggaattgaaatgattaagttaatcaaagaaagaggacataagattttcttagatttaaaattacatgatattcctaacacagtaaaaagtgccatgaaacaattagcaaagttagatgtagatatggttaatgttcatgcttctggaagtgttgctatgatgaaggcagcaattcagggattagaagaaggggcaatcaatggaaaacgtccactatgtattgcggtaacttgtttaacatctttagatcaagaagttttagataatgagttattaattcatgaacctttagcagatgtggttttaaaatgggcacaaaatgctaaagaagcaggactagatggggttgtatgttcgccacttgaatcacaaattattcatgaacaattaggtgaagaatttttaactgtaacacctggtatcagacttgcaagtgatagtgtcaatgatcaaaaacgtgtgacaactccagcaatggcaagagaactaacttcaagctatattgttgttggaagaacaattacaagagctgaaaatccagttgaaacatatcaagaagtatatagacaatttcaaggagagtaaaaacatggaaagaaaaattgcaaaagatttattagatattcaagctgtctttttaagaccaaatgaaccttttacttgggcttcaggaattaaatcaccaatttattgtgataaccgattaacattatcttatcctcatgtgagaaaagatgttgaagaagggttggcatcattaattaaagaacattatcctgaatgcgaatgtttaatgggtacagcaactgcggggattgctcatgctgctttagctgctgatattttagaattaccaatgggttatgtacgtggtggagcaaaatctcatggacgtaataatcgtattgaaggattagtaaaaccaggaatgaaagttgttgttgtagaagatttaatttctacaggaggttcttctttagagtgtgtagatgctttaagagaagcaggatgtgaagtgattggaatggtggctatttttacatatggattaccaaaagctactgaaaactttgctaaaaaagattgcactttctttacattaacaaactatgaaacattaattgaagttgcagttgaaaataaatacattcaagaagctgatttagaaaaattaaaagcttggaaaaaagatcctagtgatgaatcttggatgaataaataagattgcataagatatgaaagggaagggaaaatgacaaatttagttgcaatcttcccttttttcgtgtataacagtagaagttatgcatctatctttaaggaggataaatatgttcaagagtataaaatatgtattacatgagaatgttaccaacttgtttaggatttattctattgcaaaatatgaattattagcagatatgcgtgattctaaattagggttgttttggaactttgctcatcctttaattcaagttctcacatattggtttgcttttggtattgttttcaatcgaaaagcggtaacttcttatggggtgacaattccatatatcttttggatgatgggtggtatggttgtttggttcttcatatctccatgtattacaaatggatgtaatgctgttttttctaaagttaatgtcattacaaagatgaaatttccagttagtattttacctgcaacagttgtattaaaggaattatttaatcatttttgtttgttggttattttattttgtatctttttaattggtggaatttatccaaatattcattggtttggaatattctattatatgctttgtgcgattatttttgctatttctctttcaatgacaacatcagttttaaatatgcttgctagagatacaagaaaattagttttagcttgtatgagattacttttgtatttaacaccgattttatgggatattaaacaattaaaacatatgcctgcagttgttggttatattatgaaggcaaatcctatttattatgttgttcaaggatatagagattgtttcttttatcataaagggattttgttctatcataattctatgattgcattttggatcattacaattatattatttgtatttggtagttgcatgatgtacaaatttaaacataagtttattgacttgatttaagaggtggaaaaatggaaaaagaatatgcgattgaatttagacatgtctctaagatttattctcttaagtctaaaaataaggaacatgctattaataagagattttatgctttaaaagatattaattttaaaattcctaaaggtgaggttgttggtatattagggacaaatggttctgggaagtcaacaatgtcaattattttagctggaattagtgaagttgatgagggtgaaatgattgttaatggtgaacaagcattaatagcaattaatactgggttgaatccacaattaacaggattagaaaatattgagttaaaaggtgcattattaggtttatctaagaaaagaattaaagaaattacagaaggtgttattgaatttgctgaaattggggatttcttatatcaaccagttaaaaaatattcaagtgggatgaaatcaagattaggtttctctataaatctttgcttagatccagatattttaattgttgatgaagctttatcagttggagataaaggttttgcacaaaaatgtatcaataagatgaaagagttaaaagcaacaggaaaaacaattgtttttatttctcactcattaccacaagttagaggtttttgtgatacagcaatgtggattgaaggtggcatgttaaaagaatatggaaatattgaagaagtatgcgatcattatgcagagtatgttgattactataatgcattagataacaaggctaagaaaaaggaaagagatgaaaaattcaacaagagaattattcctaatgtaaagaaaaaaggtttttttgatagaatatttggttgatgagagaggaagaactcaatgaaaaaagtgattacctatggaacatttgatttatttcatgtgggacatttgaatattttaaagagagctaaggaacttggcgattatctggttgtagcagtgtctagtgatgcttttaatgccataaaggggaaaaaatgcattataccagattacgaaagaatggaaattgtaagagctattaaatatgtagatgaagtgattgtagaagattcttgggatcaaaagattgatgatgttaagaaacataacattgatatattcgttatgggagatgattgggaaggtaaatttgacttcttaaaagattattgtgaagttgtttatttaccaagaactccaaatatttcttcaactatgattaagactcagttaaaataaatatctgtttgtcaatacagagctaaatagaggtgactaaaatgaagaaagttattacttatggaacatttgatttgtttcatttaggacattataatattttaaaaagagcaaaagagtatggtgattacttaattgttggtgtaacaagtgaaagttatgatattgaaagaggaaaattatcagttaaagatagtttgacaacgcgaattcaaaatgttatgaacactggttttgctgacgaagttattattgaagaatatttaggtcaaaagattagagatattattaaatatgatattgatgttattgttattggagcagattggaaagggaaatttgatcatcttagacaatattgtgaagttgtttatttagagcgaacgaaaaatatttcaagcactcaaattagggaagaaaaaagtaatatttataattttggtgtgattactgatactcttgatgatagagacttgcttgatgaaattaaatatgtcagtggattgcatgttgaaagtgtttttgctaatgatgcatcaatttctgaagaattctgtgaaaaatatcaaattaataaacattttacacaatgtgatgaatttttagatagtgtagacattgtattaatcaatttagatgtagaagatcgatattcatatattaagaaaagtcttgaaaaaggaaaacatgtcatctctgcttcacctattgcactttctgtagatgaacataaagagttgtttgagattgctgaaaaaaataaagtcatcttaatggaaaatattgtaactgtatatttaagagcttttatgcaaatcctatggatggctaatggtgatactttaggaaagattttaaatgtaaaatgtgctatttcattagaaaactttgaaccacaaaaatctttttatgaagccttggtattaggggttgtcatgattattaagttattgggtcaagattctgaatgtgtacatgtaacacattatcaaaatgatgctcattatcttcatgtattatttaaaaatcaagattcaattggaacaattgaaattacgaataatattgaattgaaaaatgaattggttattgttggagaaaaaggaacaattgttgttgaagatgattggtggaatacgggatattttgagtttaagaaaatatctaagaaatttgataaaagatatagttataattttgatggaaatgggtttagatatgtgttacaagaattattgattatgttaagtgataatcgtattgaaagtacacgtttctttaaagatgaatctgaaattttaattcaattattagagaaaatgaatattaaaggtttagatgattaaacaattatagataaactaggaagtcaatggtgattatcttcctagtttattttcttagagccgttattttttaaggatatcatcgcttatatcttgagtaatattagcagaatatagtataatattggtgatatttggctataaaaataatgcttttatgagaaattgacaaatatcaatgataggtatataatcaagtgaaaattgtgtaagaaaagagtgagcaaaatgttaattgaatgcaaagaaaatgagaaaagtaagattttagattatattggaaaggattatggaaaatgtttgtatatctttattgatttatgcaaatatggtttggataatgaaaactttaatgcatggattcaatataatgataaatctgaaataatcgctgttgttactgaatactataaaggaattcagatttatagcaaagatgttaatcttgatgcaaaggaaattgctgagtttgttttacgtaaaaatcctcctgtaacattaggaatgaaagaaacaattgataaagttagagaatatatgccaggatatgaagaagaacttggaacagttggtcaattaaaacaattacaagtgtcaccaaatcctaaggcttattctgcaagtgttgaagaattaaaagaaattgttgaaattttagcagaggatgaagggattggtaaaccatatggttttgattctttatatcaacaatataaagaaagaaaagaagaaaattttggtcgaaactttatattgcgtgatgaagaaacaaatgaaattgtttgtcatgcaggaacttatgcagagcttccagaattagctgttattggcggtgttattacatctccaaagtatcgtggaaaaggatactcaaaagagacattagcagcaatttgtgaggaattattacatgaaggaaaagatgttttttctttctactatattccttctgcaaccaaaatgcatcaaggtgtaggttttgaaaaaattggcgattgggctaaattaattaaataaatggaaggtgaagatgatgagaagaatgagagaaggagaaccaatgattaattttactgttggtcctgtacagtcaagtcaaactgtattaaatattggagcagaacaagttccatactttagaacaaatgagttttctgaaattatgttagaaaatgaagcattaatgaaaaaatttacaaatgctaaagaagatgcaagagttgtttttatgactgggtctggaactgcatctatggaagcttcaattgttaatttctttgatgaaagagataagatacttgttattaatggtggtagttttggccaaagatttgtagatttatgtgaactttatcaattaaattatacacaaatcaaattagaagttggtcaagctttgacatcagaacaattagctcaatatgataatcaaggatttacaggatttttagttaatattcatgaaacatcaacaggtgttcattatgatattgatataatcagtgagttctgtcaaaaaaataacattttcttagttgtagatgcaattagttcatttttagcagataaaattgatattagtggatcaaaaattgatgtgatgattacagggtctcaaaaggcattagcatgtcctccaggggtatcagtgattgttctttcaaaaaaagctgttgatagattagaagattatccatcaaaatgtatgtatttaaatctaaaatctgcactaaaaaacggtgaaagaggacaaacacctttcactccagcagtaggaatattacgtcaaattcatgctcgtttaaaagaaattgaggctaatggtggagtagatgtagaaattgctcgggtaaaagagttggcagaagattttagaaataaaattaaagatttaccttttgaaattacttctgaatctatgtcaaatgctgtaacacctttacatccaacaacatgttcagcatatgaaatctttttgacattaaaagatgaatatggtatttgggtatgtccaaatggtggagaacttgctgataaaattatgcgtgttggacacattggtgccttaagttgtaaagataatgatatcttaattgcagctttaaaggatttacaaagtagaggaattatttaaaagtaaggatattttaggaagatattaagcttcaagaggaggaaaaaaagtggatcagttgcaagcaaatttatataaacttttggttgaacttgatgaaatatgtaaaagaaatgatgttacatattatttagctggtggaacagcattaggtgctataagaggtggaggatttttaccttgggatgatgatatagatttatatatcacaagagaaaactggaataaattagtgaaggttatggagacacaaacaccagagaatagagtttttgtttgtgttgaaaatgatgatatttattgtaatccagtaggaagatatgttgataaagaaacaactgtcatgatgaaatctcaattattgtgtgggaaagcttgtggacaattaatagagttttttgttatggatcctatgcctttaggggaagatgctaaatggaatcatagaaaattagtgaaagtttatactgaacttctttctccttattttgttgttaatagaaatattttgcatgagaatacagagtttgattttgatttatacaacaaatattataaaaagagtttaatttttggtaagaaaaaagtccttaatgaattattagaaaaaattacatcaactacaactgagaatagtgattgctattgcatgcgatggggaacaagaacactaatgtatggcattgatttattgggtgaacctcgtatggaaaaatttgaggatgctatgtttccagttccagccaaacaagaagaagttgcacgaattgcatatggtgatagttggatgtatgtgccagagggatctggtaaagtagtccataacttagataaagatttaatgacaccatttcaacaatatgttgatttgtataagcctttgttgaatgaaacaaaattaatgagaaattataaaaagaataaaagaattcgtgcaaaagcactttataagaaaaatgagtttaaatataattttgcttgttcgcgagctaagattgctgccaaacatattgtggaaagtgattatgatattaatgttttaagagagttattaaaaaataaagattttgctcaactacaaaaacatttaagctatttctattcagttcaatttaatccagatattaaggttgataatattttagttccagtatctgatgaatatatttatattgcagtcatgaatcacgtattacaaggtgcttattataaagtgaatagtattatgagtgcaagaaaaaatataaataaacctttaacagatgaattacaagaagcagatcgtattatgcaattttgtaaacaactttcaatcgcaatttatgataaaaaagatattcaattagttgaaaatattttacaagaaaatactcaatattcacacatgattcctgattatgctcgtggtgaactatgggtaatgtgtcaaaaagcaaatacaaatgctgactatgagaagcttcttaaagaagctaaagatagagtggctttatttgtggatgatggtgaaatcatgagatatgaagcttatgcgctttatatgttagacaaaaaagatgagtcaaaagaaaaatatatagatgctattcaaagaacaagaaatggatttgtttggaaagaagtcaatgatttatttggaattgatgcctatgatgtcattgataatcaagaagatgatgatgaaaatgaagatgtagaggatacgaagaatgatgattaatacaggatataacagtagaaaagaagtcgtcactgatttactttttgagttagatgatatatgtagaaagaataatttgaaatatactcttacgggtacatttgcaaatacagtggcagaagaaggaaaatttccagatgaatatgactatataacaatcgcaatgactcaaggtgatattgaaagattaattgaaattgtcaatacctcagaaaacaaacatagggaaattgaatatttcttaaataatccgtatgcgagaggttttcaaattagatattgtaataatgatacaactcttattaatgtgaaagaaattggaaatcatgtgaactatggtatgtttattagaatccaaacagtttggaaagtgccagatagtcgctggagagctaaatttgtatcaactttaaaacaaggttggaaaggtagccagaaaagattagcttcttgtaattataaacgctatattcctgcggttattttaaagtgtattgttaaattattaggtaaaaataatgtgcgtcgatggctttataattacaataaaaagttaaaatttataaatagatgggaagatataccacaaaatgaaaaattaagtattggtaaaggtattttttcaggtgaagctgattggaatttaaaagatttaacaattgatggacatcacttatatgttgctgatgctttattacatagaattgttgatcctcatccaacacatgctacagtaaaaataaatgatattgaagatttatgtatgccttttaaagatatcctaaatagtgatattatgaaagatttatatacaacacaaaaatcacgtgatcagtatttatttattgtaacacgtgctaataaagcagtaaaagttgttaataatgcatggcaaacatatttgatgacaagagatgttattcgttttaaagatctttataatgatgagaaattattagaaattgaaaatttaattaatgaagataatgcaatttcttgtgaagaagaattattagaatataaatcagcaaaaagtaaatggagaaaacttaatatttcgtttattgaaaatgctaaggttgaaagattaatagctaaagctgataagaagtttaataatgaaataaattcataagtatgcatatttgagatagtgatttacaaaggtggttatttttgtagccatctttttttaaggaaagaaataaatatgttttaaaatgcattttgatacacagaagttacacaagattattatataataattaaggttcgaaaaagtgagtattaggaggtagtatatgaagatgaggaagaaaagaattttattaacaggtatattagctgttgctattgttttagtggcatattttgcaattttttattcaccaagtggttctacaaaaggaagtccggagatttctttgattgaatctactgatcaatatgtgaaaattcaatggaaaaattcaaaggatgcgaaagaatacaatatttatcgcaaagaagatgatggtgattttaagaaaattgtgactttagatggtaaaaatactgagtatatagataaagatgttttagtagataatacatacacatatcaaatagaagaagtattggcacacaagacatcaaaaagtgatgaaagaaaaatttctcttaaaaagatagatgcacctgaattattatctgtaaaacgttattctactaaagacaataaagaggctgttgaattgaattggagttcgcatgatggatatgattattcggtttttagaaaagaagctgatggaaagtatcaagttattgcaaatgtaactgcaaattctaataaatcaagttatattgattcaaaaattgagaatacaaaagattatacgtatacaataagaagaaaacaaaaggatagtaataatgtttatcaatatggtaaatttgatgaaaaaggtattacaacattgtctggaaagccagaagttaaaggtgattttacaaatttaaaagcaacaatttcatggtcaaaagttaatggagctaataattatattatttatagaaaacaaggattaactggaagctataaacaaattgctaaagtgagtggaaataaaactcaatatgttgatgtttataataagagtttaaaaactgaaaatgaaaagaaaattttaggtgctggatactttgttgatccatcaattaatgatttggtttatacagtaagagcttataaaaatacaaatgataaagaaagtttcagtaattattcaaaagatggtgtatttaatatttgtgcaccaagtattgttaatgttgaaaatacaaaagacaattcaacaaaagttgaatggggaactgtaaaaaatgcaaatcaatactatgtttatagtggttatgatgatgctcaaggtaaacgtcattgggaaaaattaaaaactgtagatgctaaaaatagtgttgtgcaatcaattaccgtgaaaccaaagaaagaacatcaatattttacagtgaaagcatcttttaatagagatggaaataatttatatagtgattatgataagaattatcgtattaatgatcgaaaatacgaaaataagaatgtcttattctttggagatagtattacatttggttcaccttataaaggaaaagcaacaagaacagtattctcatatccatggagagtacatcaacttacaaatgtcaacttctataacccatctattccaggatcaacatacacatataaagaaaaaaataatcgttctcgtatggtacaaattgctgattgtttagataaaggaaagaatgttgaaaaaaatgatttaacaaaaccagaagatatgtatgtttataaaactgattttgtggacaatcaaattaaaggtaagaaatttaaagattttgatgttgtaattatggctgcaggaacaaatgattatttagataataatccatttggaagtatccatagtacaaatattcgtgaatttaatggtgctattaataaagtgatgagttatattaaaaaagcaaatgttgaaagaaataaagaaggtaaaaaggccattaaaattgttttcgttgatttattctatagtgatagaacaaataattatgcacaaaaaacaaatcgttttgtaacgaaaaataaaattggtttaactttaactgattatcaaaatgatattaatgcattagtgaaaaaatacaaacaagaaggtttagatgtttatcaatttgctactgatgatttaattaatcaaaaaaattgtccatatgtagcttctgataacttacatatgacaagatatgcttatggacaaattggtaataaactttcagattatctaattaaaaataaaattatttaatgaatgagaagattgatcactttagtgaccaatctttttcataaaagacttgaatattttaggtaaaggtggcataatcgaaaactgaggtggaagtaatgaaaatattgagaaaatttaaaaagttagcaggtcaaattattaaaatcctttatagattagtttatagacttattagagttgatgataaattagtgatttttatttcatttcatggtagaggatattcagataatccaagagctatttatgaacaaatgaaaaaagatgaaagatttaaagattatcgttttatttggtttattaaaaaccatgagaaaaagaatattaaaatagctggagctgaaataaaagaatattttagtattccttatttttattatttatcaaaagcaaaatattgggttatcaattgtaagatgcctgattatatttgtaagaagccaagccaaatttatttacaaacttggcatgggacacctttaaaacgtttaggacatgatattattgcgcctaaagatgcaacattctaccgttcaggtatgacttacaaacaaatgtgtgcaacatatgatattgatgttgctagatataattatatgatttctcctaataaattttgtacagaggttttccaaacagcatttggaattgatcgccaacgtctcatagaaacaggttatccgagaaatgattttattactaatgcaaatgaagaagatataaaaaaacttaaacaaaaatttgatttaccattggataaaaaaattgttttatatgcacctacatggcgtgataattcttatgttgcagcgggttatacatttgaattaaaagcagattttcatcaatggaaagagatattaggtgatgactacattgttatttttaaaccacattatttgattattaataattatgctaatgatcattctttagatggctttttgtattctataagtgctgatgctgaaattaatgaattatatgtattaagtgatattttaattactgattattcaagtgttttctttgattatgcagtgttaaatagaccagtgtatttctatatgtatgatttagaggaatacaaagatgaattaagaggtttttacttagatattcatactgaattacctgggaaagtttatgaagatgaagaaactatgttaaaagatgttaaaaatgaagtttatgattattcatatttgaaaatttttaatgagcgatttaattcagaacaaactggaaattgtgctcaaaaagtcattgatattgtttttcaaggaaaataaaatcagtcctattggtgaaataggactttttaggtttcataattttttaaaaagtgatagaatagaacttatattaaggagttagttatgggaattcaaaagacaattttaaattttattttaactatagaatctttttttctttcttttttaaaaattaaaaaagaaagaatcacctttatatctttagaatcagaaaaattagaattagattttaaaaagatatatgatgaattgaatcaagaagaatttgatgttcgattatgtttaattaaatatcataaagatttatggggacaatttttatattttataaattgtatgaaacaattatattatatatatacatcacgtattattatattacatgataataattatgttgtttcacattttaaaagagaaggtgttgttgttcttcaagtttggcatgcttgtggagccattaaaaagtttggaaatgttattgatagacaatatccaatagcgaactatgattatgtactagcaacttcatcttattggaaagaaccgtatagtcaagcttttagtgtaaaaagcgaaaatgttttaccaattggtatgcctagaactgatgaactttttaataacaattggttagaagaaaaacgtaaagatttatattttagatatccacaattaaaagataagaagattattttatatgctccaacatttagaggtaatatctataaaggattttcagcaattgaatttgatgcacttaaaatattagaacaattagattcacaatatgttattctatataaatatcacccattaatggggaattatcaattacctgatcatccacgcattatcaatatgaatcatgaagatacccatgctttatttagtatcactgattatttaatatcggattattcatcaattgtgtttgattatatgattttaaagaaaccattgattttctttacaccagatttagaagaatatagtcaaagtttaggggtttttgttaatttggaaaatttggggtatcctatatgttatagtgaagaagaaattgtatcatctatttgtcaatatcaagtatctcaaaaacaaatggaagatatgaaagatttgttttttacatatcaagatggtgaaagtactacacgtgttattcgttttatggaatcaattatacaaacgaaaaatatttttcattagaaaatggatatattgtttgtaataaatagtagagtattaaaagattacttatataaaagtcagtagaaatgctgacttttatcatatttataattttatttcatatgttttattaaaagcataggagggaaattatgaataggggagaaatttattatgcagatctatctccagttgtaggaagtgaacaagggggatatagaccggttcttatcttacaaaataacaaagggaataaatattcaacaacagtgattgtggcacctatatcatcacgtatgacaaaaaatgatttaccaacacatgttattattgaaacagaatttttagagaagaaatcagttattttattagaacaaattagaacaattgataaaaaaagaatagatgaaaagttaggaagtttatcacaaaatttaatggagaaagttaatttagcaataaaaacaagtttagacataagatagcagatatgttataataattgaaattaaggagtgaagtgaatgaaattatcaagtattaaaaatcgagcaaatgaaattttattaacaaataaatctgaatatattcgtattttgacgattatattattagttggtttaattccaagtctattttctgggaatagtaattttctagcgatattagtttattatgcaacgattattatatttttaccatttcatcatggttatattgttagctcattgaaaatggtaagaaatcaatcacaagcattaagtgacgatgatgcttttgttggatttaaaagatttaaagaactatttgctacatatttcttatcaaatgttattgtatgggcaatctcggctgctgcaggaatgattttggttcttttattaagttttacaattataaatgctgcaaggtatattgtggatgctgcagttaatcaaagcaatgcagctgcattagctcttgctgctattcagcatacaccttcattaattatttttatagggttatttttagtgttggttgctattgctatagtgattgtatcatcatatttatttgcgatgccatacttattagaacagtatcatatgagtgcgacacaatcattaaaagagtctattcaatttatgaaaggtcatgtttgggaactgattaaattacaattatctttcttaggatggatgattttaattattgtcattcagtcaattcttattaatttgcttgcatttattccagtaattggatccttaatcgcatctattttaggtggattagtggctatttatacgtatttaccacgttatcatttatcacaggcaatcttctttgaagaaattgcttactatcgttatgaaaataacacatatcaatcaaatactggagagaatacaaatgtttaatcaatatttttcaagaaaaatctcactacaaatcaagtggatgtttctactcattatcgtaccattatatttttattgtagttcagttattggaacagctatacttaagtttttagttatacaattttcttttcaatgggattatataacgcttaatacttatttaaacttcctggttgatagtgttatgttaattcttgttggttggattatgaaagatacaatgattgagcaatggaaggattttaaaaagaatctcaaggataatgttatttatggggtattaattggaacagcacttatttatgtagtaggcattctaggtggtatgattactcttatgctaggtggttcatcaaatagtgaaaatcaacaaatgattgaaactattatgaatgttcatcccttactcatggcgattacaacaatattttttgcaccaatcttagaggaaatgatatttagaggaattgtttttggctggttatatgaattgagtcctaaatttgcacattttatatctgctttcatttttggttttatacatgttatgatggctattttatcgggaaatatttcagaatgggtacaaatcttttcttatttctttatgggatttgtattaagttatttatatgaaaaaaagaacaatatctatgttccgattctagcacatatgagtaataattttatttcagttatattaatgatgatttaaaaagattagcaaagtgatgagctaatcttttttattgatgttttaatgttcttatataaacacgatatttatatgaattaattaaaaaataaaaaaaccgaaaatattgattaaatcaatacttttcggtatcttttcattggtctcccctcacgggctcgaaccgtggaccctctgattaagagtcagatgctctgccaactgagctaaggagagttcgtcaacgaatatataatacactaaacttacaaaaaaatcaagtgattttaaatggaatattgcaataaagtttgttataatatgagacaggggtggtggaaatatgtatagacagtcaattaatcatattaagctcgctataattccattagatgggactgtatttgatttaaatagatttcgttataattattatcatcatttatgtgatcataaaaagataccatttggtgttcaagatttttatctacatttatcaagcatgtatgatatgtataaagatcttccattaacgaataaattagatgctggtcctttaaattcaaaaatagaaagagaactttctcaatacttaaattataaaggaatagagcctaaagaaggcttcctcgagcttttagaatatctccaccaaaaagaaataccaattgcgataatatccactcatcgtactaaagatgctgctcaatatttaaaactagcaaaaatatatcataaagttcattttattattggaagtgatgctgtaagtagtccacttccttcaactgatattttagagacaacgcttaatcattttcatgtaaaaaataatgaagttttattaatttcatcttttgctgctttaaatgaagcagcctctaaaatgcattttaatattatttattgtgaagatttagttgaagcagatacatatgaaaaagaaacatcttataagatagttcataatctttttgaagtattaaatacattgttatttgatcaatatgacgaggcagaaatctattcaccaatcttgggaatgagttctgatatgacacctgaggaactgacacaggtcaaggatgaattaaaggaaaagtatcatgatgatcaacaaatagtagatcttgtcaatcagacttatgcttatcatatttcccaacttaatgaacaaagtattaaagacggaagtgttcttttaaatcaaacacctatgagaaaaagatttcattttgatgatgaaacacaagaaatatcaaaagctgaattattttcgttaactgatgaagaagaaatacaagaagaaatgagtaatgaggttgttgaaaaaaaggccgaagaaattcatatatctccattagataaagaggaagaaatagaattaactgaacttttacaacagattaatttttcttcatctcaaaaagatgaatctcaaccaattcttgaagttgctaaacaaagtgaacaaattgaagaaattatagaaaataatgaagaagaaaaatcttcaccagtgtttgaagtctttttaaatattatttatatatttgctatttcatttttagttttatttgcaggaattattgtctatattacatttatccatcaatttgaaatggatcaaggtatttttcacactatccatgttgtttttcaagcttatcattcatttgttaatatgatttttgaaggtgtattggattttctacatacatttatcagttttattccaagctatcaacaatatagtcaatcaaatacaatgttatcaattgatggtgttttgttattaaatttatttatctttcaaacaattattattgctattataaaaggtattgttcatatgatcaaaaggagtttagacgatgaaagccttcctgaataaaataaaagaatatgatgtccgttttgctttttctatgactcaatattaccatcatcgcttttttaatgatttgatgatgtttatcagctcatgtggtgattttggcatgagttggttaattgttatcttaattacaaatatgattgacgagacgcgttctatgtcgattcatatgcttatagcacttattgcagcaacaattattggtcaggtaacaattaagtctattgtacgaagaaaacgtccttgtcatcaatatcctgatgtaaaaatattaattcctgtacctagtgatttatcatttccttcaggacatacaacatcttcttttgcatgttgtacagtgatgatgttttttaatcctatgttagggattattggctttatctatgcgatactgacagctttttcaagattatatctttttgttcattatttaagtgatgttatttttggaatgatattggggacggttattggaattgttgtatgctgtttataataatttaaaaaattttttaaaaatgtattgaaattaaaaaaaatatatgctattatatctaggcaactgatggagacatactcaagaggctgaagaggcgcccctgctaagggtgtaggtcgggaaactggcgcgagggttcaaatccctctgtctccgccatagtgttgcccttggcagtttatatatattggtctggtagttcagttggttagaatgccgccctgtcacggcggaggtcgcgggttcgagtcccgtccagaccgccaatatataaaatagagttatcctagtggataactttttttgtttctatcaaaaaagtcctttgtgaaaaacaaagggctttatttgttttgttgaacagcatacataatcgcaatcactgttttggcatcaacaatttcaccagatagaactttctgataagcttcatgaagatccatcttcacaacatcaataaattcatcatcatcacaatcaagtgaatcatcaacttctttaaaatcaaccgcttcatacaaatataaccattcacttgtatatcctggtgaaggaagaactttcataataaatttcatgtcttgagcacggcaatttgtttcttcttctaattcacgaaacgcacattctttggtatcttcatctttttctagttttccagcaggaatttctaatgtgttaacacgattaggatatctgaattgtttaactagtaaaatttgatgattttccactgcaagaacacaaacaccaccatgatgatagacaacttctctaaaagcatgatttccatcttctaattcaacttcttcacgagtgacctgcataatttttccatcataaatcacttctctatttaattctttttccattttttcaactccttatctttattatagcacaaaaaaagaaaagaaagtacgcgggggagcatactttcttattctctctattatttacacgttagggtgataataggggggtacgattaagtgaataccacttaacaactttattatatcaaaatttcacatattgtaaaggctttcagataaaaatggtgtattttttaatgaaatttcgttataataagaggcggtgatgaaaatgaaaaaaatagtcatagatgaaaatcatgctaatcaaagaatagataaatatttaaaaaagttattatgtcaagctccttcacaattgatttataaaatgcttagaaaaaaagatgttaaagtcaatggtgtgaaggtcaaagaaaattatattttacaaaatcaagatgttgtggaactttttttgtatgaagataaatttcaagagtatacaaaacctcaaacaatttttgatttaaaaatagaatttgaagtcttatttgaagatgaaaatattttagtagttggtaaaccagctggacttttggttcatgaagatattaatgaaggaatgaatacattagcaaatcaagttttaacatatctttatcaaaaaggggaatatgatcctcaagcttctttaggttttactcctggacctgttcatcgattagatcgaaatacgagtggcattgtgatatttggtaaaactatgcgagctttacaagatttaaatgaaatgatgaaaaaaagacattgtatagaaaaaacatatttaacaatttgcaaaggatatatgccttcagatgaattgattggttatatgaaaaaagatagtgatcagtcacttgctagaattgttagtcaaaatactcctggagctcttaagatgcatactattgttgaaaatgttaagtcaaatcaagaatactcattattaaaagttaaattgattactggaagaacgcatcaaatacgtattcatttatccagtgtgcatcatcctattattggagatagtaagtatggagattttgaattgaataaaaaaataaaaaaacaatatcatctaaattatcaatttcttcatgcttatcaaattcaatttgttaaaccaattggttgtttaaaatatctacaagattataaaatcacttgtcctttaccacaaaatttattaaaaataaaaaaacaaatctttaatgaaaaatgacctatgaaaatggctgtttttattgtataataatcttaacataagggaggaaaacataaatgaaatactatataggaattgatttaggcggaacaaatgttcgtactttattagttgatgaaactggtaaatcttatagtgaagtgaaggatgcaacagaaagagataatggtcctgattatgtttgttcaaaaattatccgtcaaattgaaagcttagattgctcagtttgtggtggattagaaaatgtacaaggaattggaattggtgtaccaggaccagttgatactgaacatggagttatgatcatggctacaaatttacctggttttgaaaactatccaatttgtgaaaaattatctagccgtttcaatttaccagtttttattgataatgatgcgaatgttgctggactcgctgaagccttacttggggctggtaaagggaagccaacttgttattatgtgacaatttcaacaggaattggtggagcatttattgtcaatggtcaacttgtttctggtggtagaggtcatgctggtgaaattggaaatatcattgtgaaaaacaatggttataaatttggtggtttaaaccctggtgctgttgaaggtgaagctagtgggacagcgattactcgtaaaggaaaagaaatcttaggtgaagataaagttgcacatgctggtgatgtctttagattagctgatgaaggagacattaaagctcaaggtattgttgatgaatgtattagtgaacttgcaacaatgtttgcgaatattgctcatactgttgatccacattgctttatcatcggtggtggagttatgaaatctaagagatatttctatgataaattagttgaacaatttaattctaagattcatgttggtatgagaggatatatcccattgcttgaaactgaattagaagattgtggggcaattggtgcagctatgcttccaatgtctaaattaaaataatgctgataaaaagatttatgactataatatagaaataaatctttttctttataatagataaagaaagtgatagaataaaagggcaaaataaggagggtctttatgaaaaaaagagttgtattaggattaagtggtggtgtggatagtgcagttgctgcttatgtattaaaggaacagggatatgaggtcattggcgtatttatgcgtaattgggactccactcttaataatgatattttagggaatcctacgaatgataatgacatttgccctcaagaagaagattacaatgatgctaaaaaggttgctcaacatttaggtattgaacttcgccgtgttgattttatcaaagaatattgggatcatgtttttacatatttcttagaagaatatgctaaaggaagaacacctaatccagatattttatgtaataaacatattaaatttaaagcttttttagattatgcaaaatcaattgatgctgattttattgcgactggacattatgccagagtagaacatcatccagatgaagattcagtgatgttaagaggtgttgataataataaagatcaaacgtatttcttatgtcaattaaaccaaagccagttacaagcttcattatttccaattggtgaattaaccaagccagaagtaagaaaaattgccgaagatcttaatttaccagttgcgcataaaaaagatagcacaggtatttgttttattggtgaaagagattttagagaatttttgaaaaactatattccagcaaagtcaggaaaaatggtggatattgaatcaggaaaagttgttggagaacatcagggaattatgtattatacgattggtcaaagaaaaggacttaatattggtggacctggtgatgcttggtttgttgtaggaaaagaatatgatcaaaatattttatatgtgtgtcaaggtgatcaaaatgattggttgatgagtgatggggcattaattactgatgtgaactggatttcaagtgataagcctacagaagaatatgattgcaccgcaaaatttagatatcgtcaaccggataatgatgtttcgattcattttgtcgatgagacaacaatttatgtgacatttaaaaaaccaattaaagcagtgactccaggacaagctgcagtcttttatcaaggtgatgtttgtttaggtggcggaacaattgaaaaagtgtataaggataataaggagattacatatctataatgttagaatatacggggattattaaacaagttcgtttttatagtgaggagacaaaatttattgtttgtgtcattgatagcgaacaagaagataaaccgattttagcaactggatatatgagttatgttaatccccaagataaatatcattttcagggggattatattatccatcctaaatatgggaaacaatttcaaattcaatcctatgagattatattggcggatgatgagagtgaaatcattcgctatttatctagttcgctttttaaaggcataggagaaaaacaagccactgcaattgttgaaacattaggaaaagatgcattaaataagattaaagaagataaacatgttttagatcaagtcagaggtatgaatgaaaaaaaacgtgagacgattgctgaagttttatcatctcaagattttgatcaagaagttctttccttttttatgggacatggaattagtacaaaacacttagcattaattcaagctgtttatcaagaacatactttagatattttacaaaataatccttatcagcttatcgatgatattgatggtattggttttaagacggctgatgatttagcgttaaaaataggggttgacccacttgatgaaaatcgtataaaagcagctattctttatgccttaaaagaagcctgttttcaagatggaagtactttccatgaacatgatattatttttaaaagatttcatcgttatatacctgcaatatcttatgaacaatttgatgattatttagatcaattattagaagaaaagaaaattattcaggatgttgaaaaatattatccttatgatttatatgaaagtgaagtcacaatatgtcaaacttttaaacgttttattgatgcaccattatatcaatatgaagatgaagaagttgaacaattattaaatgatcttcaacaacaattatctattgaatatgatgatttacaaaaagaagcgattcatttatttttaaaacagtctgcaatgattttaacaggtggaccaggaactggaaaaacgacaattgttgaagcgattatgaaattatataccaaattaaatcctgaccaaagcatagcattggtggcaccaaccggtagagcagctaaacgtttaagtgaagtaacgggactagaagcttgtactattcatcgtttattaaaatgggatttacataccaatacttttgcaatcaatgctcaaaatccactagatgttgatttattagtgattgatgaattttctatggttgatacattgttattttcaaatttattatcggcatctcgtaaagttagtaaaatattattaattggtgatgatcaacaattaccatcagttgcacctggacatgttttaaaagatttattagattgtgaaatggttccaacggttcgtttaaatcgtatttatcgtcaatcccaagaaagtgggattgtacaattagcacatagtattcgtaatgatcaatatgatgagaatttgttttttgaatataaagatattcattttcaaacatgtgcttcttatgatgttgtgaaatatgttcaagttcttgtttcaaaagcaatgaaagaaggctatgatgcaaatgatatccaagttcttgctccaatgtataatggtgttgccggaattgatgcattgaatgactgtttacaagatttattaaatcctcatgatgaatttaaaaatgaattacgtgttggaaaacgtatttatcgtgaaggtgataagattttacaattaaagaatagaattgaagataatgtttttaatggcgatattgggacattagtagaaatttgttataaagataattttgaatatcttacagatactctgattgttgattttgatggaacttatgtagaatatacagccaatgatttttatacaattacccatgcttattgtatgagtattcataaatcccaaggaaatgaatttaaaattgtcattatgccagttttaaaagattattatattatgttaagaaaaaatttaatttatacaggtttgactcgtgcaaagcaatcactttttgtgattggaaatcatcaatcatttcaatatggcatagcaaataaccatgatgagaaaagaagaacaactttaaaagaaaaaatgctcgatactcctacactttcaccgtatgattttatgtaatatggacatactataaatgtacttttgaaggagtgagacaatatgtctaaattagcagttgcttttttctcagctggaattgttgctgcggcaatgattatgatgagtgatatgccttgtgctgacgatattgaacattcagttcataaagctaaaaaggctatcaaagatcaactttaagaagtacaaaggactcatagtagtccttttctttacaaaaaggggtcatattatgaataaagttatacttgcaaaaaatattattatctttagtatatgtgcaattttgttatactatgtttttacattgtttcagataggaaatttattatgttatattttcaatctgttttttcctttaatgattgcactcttttttcattttttattggacccgattattaattattttagtagtgaaagattacaacgtaagatcgttgttgttcatatttatttatcattaacacttttatttattattggttgttattttgtagctccttatattttgaatcaatgtttacgattttataaccaattttgtcaaggaaacttaaaattaaatcctatcttttctactattattcaatttctagaacaatatcaagtgattgattatttaatgaatatattaaatggctggacacaatctgttttgtattgggttacaaatattttacttgcaatggggatatctttttatttatcttatgataacctacacttgattgaaaagcttatcatttatcttccttttgataagcaaggaatatgtatgcaaaccctaaagaaattaaaactgattacttatcaatttatgaaatcaatggttttagattttggctttttcttttttatgtgtttaattcctttcttttttattgatgaaagtttagctgtctggattgctttgtttttagctattaccaatcttattccctacattggaccttatattggtgggataccagttgttatttatgaatactttattaatcctgagttaggttatgcggcttttatgagtgttattgttttacaatatttagaatcctcttatttacaaccttatcttttttctaaatgtattaaacttcatcccattgctttatttattgccttgacgttctttggtgatctatttggagttgtggggatgatcttttcacctttatttttatcatatacagttttgttgttgggattattaaaagaattacgtgttttttctaaggtttattcaattgtaatgaaagaataacgataaaaggtaagtgatgagcttacctttttatttttggtcgtcttattattacattttcttttaaccttttttgctatgcttttattgaggtgggacaatgaatatatcaggggctttaggaattttaggcggattggctttatttttatatgggatggaattaatgagtgaaggacttcaagaaagtgcaggggataaattggaatatgttattaaaaagttaactgatcgtaaaataaaagctgtttttgtaggaatgttgattacatgtttgattcaaagttcatcagctttaacagttatgttaattggctttttaaatgctaagattattgatttaaaaagggcgatttgggttgtcatgggtgccaatattggaacgacgattacgggtcaaatgattgccttaaatattgggatgattgcgcctattttagcgattataggggtgattatgattgtttttttatcatcacgtttttttgttcatttaggaaaaattattgggggaataggaattttatttatgggcttagaatttatggcagtttctttatcaccattacaaaattctgccacttttttaaattttatgacgtcattatcacaaccttacttagcaatccttgctggagcaatttttacagccattattcaaagttcatcagccgctcttggaatcttgcaaaccctagccaagcaaggtttactacattttgaaataggagcttatatgatttttggactcaatataggaacttgtatcaccgcagttttagcttctttatcaggctgtcaaaatgctaagaagttaactctattccatattctttttaatatcgctggaactgttatttttgtagctatttgtcaaataacaccttttttatcattgatagtttctttaactcctcatgcttacatgaatcaattagcaaatcttcatactttatttaatgtcatcacagttctcattgtcttatgtatagatcaatattttattgattttatcgataagatattttctaaaaagtaaattttctgatgaaaagagttttcattttttacaaagtaaatgaaagaaaaaatgaaatgtgattgtaaacccttacagatatgttgataggtcaaataagacatgataacataagcaatgtgaggaggaaaggttatggaaaatgtagggaaaaggatatttgcttcattgttatcattatctatggtaagtggattggtgtcacataatataaagcctgtacatgcatcagtagatgcagatacaacgatttatattgactcggatcaaattgttacaaatgattttgagggatttggagtgcaatgggatccaagtgatttgtattcttatacagatgagcaatgggcatcttttaaagaaaaagcaaagtttttaaaaccgaatgtcatgcgtgtcatgttgcatgatggagatagttattgtattggttttgatgaaaataaaaaaccattatatgattggaattctcctttaatgcaaagaacatatagaatattagatttcgcacaggaaaataatattcctattatgattggagaatggcgaagtattagtgaaagaggttatttatcttatgatgaaacgggaaaagaagtgtcatgggataatccaatttgggctgagatgattgtagattgtttaaagcatcttattaatgataaaggttatacttgtattaaatactataatatgattaatgaacctaattattataagcgtgatcatcctagtaaaacggatcaggaagtttatgatgcttggaaacaagctattaaaaacttacgagcaaaaatggatgaaacagcgaataaacagattacaaaaataaaaattgttggtcctgatgtttatgatggtcaagaagcttggattcgtcaatcaacaagtgatgatttaaaagatattattgaattaacagaagtgcatcgttatgcaccaaaaagtgaagttgaatcaggattaattgaagaaaagttaaagagttggaagaaattagcagaaacattgaatccaaaaataaaacaagatggttttgctttaggagaaatggggcttgctggtacgggtcctggagattgtcaattgggtgttagaaattatgaatatggtgttgatattttcgattatgcccttcaagcaacacgagctggtttaaaatttggaagtgtttggggatttgaagatagtatgcatcttcaatcaactgatgttgttacaacatttaaagataaatatggtcctgctgcgacaacagaagaaggtcgtcaatataaagttcatacacctacaggagatccgaatattgataatgatatcaagatttggggattctggaatgaattgggtgaagaaatggctgcacaaaatagtgccaataacgttactggtagaccaaatacagttcaagccagcgatgaaaagataagaccttggtattatacatggtcaatgttttgtcgttatttcccagctggaatgaagattttagaaacaacggatagtggaattgatgctgttagagcaacggctggtcttttaccaaatggtgataagtctgatgttagtattgctgttgttaattcaactggtaaagaaaaaacaatagaattaaatgttccaaatgcaaatggtttggttgatttgaatcagtatttctattatgatggtgaaattaatggaaagactagaccagtcaatgaaaaaggacaagttttaccatatggtgttattaaagatgcttctttatcaaaaggtgtagaagtaactttaccagcaaattcttgtatgattttaacatctttaggatacaatggtgaaagtcatcctatgtcattgacaactggtcaaaaacctgatgtcaataaagttaatatttttgaagaatcaggagtacaaaaattatcagttggagaaacttatcaaatatctacaaagtttacaccttctatatcttcggctgatatggaatggaaggtaacagattattttggtcaaccttcttctttagcgacaattaatgaaaaaggtttattaacagtcaaaaaacctgggcagtttaaggtagaaggatctgttaaaggacatccagaaattaaagatactattactttcattgcaacaagttctaaagttttagttgatgtatttaatgtttatgatgagcctagtgttggtaaatatgaaaatattgtgaaagatgataaacctagcaattttaataatgtccaaactgtaaaacgctctgatacaaataaaccagcttatattacatatcaagcagatggtatttatgattttgaatttgatgcttattcattacatagtgatttagggaaaacggataacttccttgttgaagcttcagtagataatcaaacatgggaaaaaatagaatgtgattatatagcagaggctaagttaagtacaaactggtataagattagtgtgactgataaagctatggatacgacaaagaattatcaatatttgcgtataacattacaaagtcataatggctataaagtttatgatcctcaatacggaggaggtagcattttatatggtgatcaaggtgtatctgaaattatcattgataacaaagaagaatttgttgtaaagggagaaactttagaattaagtggatctattttaccttcatctttgtctcaagatattgaatggagcgttgttaatttagatggaactccaacaacaaaagcatcaatcaataataatgtcctaacagctaaagaaactggtcaagtggttatcattgcacaacctaaagatcattcattgagttgttattatccaataaatattgttggtggatatattgaagatgatattaaaaattatgatttaatgtatgatcatggaagttttgtttatgaaggttcttctaataaatttgatgataaaacaattattaaaagaacagatgatactccacaaagtttagtttattcatataatgggattcaaaaaggaacatttgaagtttattcaaatggctctgtctcagatgaaaatgttgatatttatgtatctaaagatggattacattatgaagtattagataagacaattacaagaattggaccagcttcaccatctaatacagaatatcaaaaatatgaagtaagtgcttttactaatagtgatgaatataatttcataaaatttgaagttaaaaatgatagtaaagtttatcgtccaatgattggtaaagttaaaataatttataatccagaagataatgcaaagacaattgatattaatgttgttaattctcttattaaaatgaatttaggtagtgaaacaacattagatgttaaaattgctccagcaaatagtcaaccacaattaacttatgaaagcttagatgaatccattgcttcaattgataaaaatggaaaaattacagctaaaaaattaggtagcacctatgtcattgcaagagttaatgatcaaatctatactcgttgtgttgtgaatgtctatgaaaattttgcctataaaaagaatgttgaagtttctggaacttatgccggaggagatatagcattaaatgcaactgatggtgattattcaacacgttgggcatcattgagaaataataatcaatatataactgttgatttaggaaaagttcaaacaatcgatacagttaagattttctgggaagcagctagagcgaaagattatagaattgaagttgctggtgaagatggtcaatttaaagttgttaaagaattcaaagatatgacagctaattcattaaatgatttaattacatttgatccgatggaagcacgttatgtcaagatgcaaggtattacaccaattggaaaatacggatattcgatttatgaatttgaagtctacaataacaaaaatattgtaaatgtagaaaacattcaattatcagaagatacaaaagaattatatttaaatcaagactatgaattaaatatccaagttaatcctagtcaggcaacatattcattgccagtattaagcagttctcatgaaaatattgtttctattaaagatcatagacttaaagctgttggagttggcgaagctatcatcacagttgaagcagatgaaaaagtaacacaattaaaagttaaagttgtaaaagcaaatgcacaaaagtatgctgatgagttagatactttaaatattcaagatggaaagattgttttcccaagtcatgagggatatacatattctatatatagtacagaccacaaaaaagtgataagtaaagatggcattgttcatatgccaatcaaaacaacagatgtaagtctcatcgttgaagttaagggagaaaaagatgtggcttattcaaaaataatacatgttgtgataaatggtaatgaagattgtttacatcatattgaaaaattaattgcagatatgaaggcattagatagtcatctttataaaccatcaactttgaaaacattaaatgaatatatcaaggcaacagaagacttattaacacaaagtgatttattggttgatgaggttcaagaagcacatgaacaaattctttctctatatgaaaaattagaatataaggcagatcgtacaactttagatgctttactaaaagaattgagtcaattagataaagaattctatacagcaaactcttatcaacagttgctaaatgttataaaagatgtacaaacacaaattaatgatgagtcttctcaagaagatatcgaaaaagcaataatacaattacaaaccgcacaaaaaacactcgttaaacaaagtgattatgatttactgttcaataaaattcattcaataacaaatgaagatttatcaatgtatacaaagaaaagtgttgatgaactaaataaagtattaaaccaagctaaagaatatctcaatcaagaaacaataacaacatcatgtttatatgattattattatgaagtcacaaaggcttatcaagcattagagttaaagggagatcaaacaagtttagaaacattcattgaaaaaattgaaaagatggatttatcaaaatatgaagatcaaggtgttcaaaacttactaaatgtaatcaaagatatcaaacaacaaatgaaatctgatttatcacaaacagaattgaataacctcatctcaaaattagaaaatgcttatcatcaacttgttttaaaaacaactacagatgtgaatgaaaataataatcaagttgctacaaatgataatacacaaatgacaggatatatgatgatgtttatcatctcttgtttgacagttgctttgcttacaaaaaagatacttagcaaaaaagaaaattaagatgtgaaatagggacatgctatgatatgtccctatttttacgtaaaatgaaatgatttttcattcattttattaatcatgaagaaaatatgaaatcgaattgtaaaccctttcaattggcttgtgaggctaaaaaatgcgtgttagaattttggaagaaaaggaggaaatgaaaaatgaaaaagttattcgcattggtattgagcttttgtatatgtttaacaatgtgccctaaagtttttgctgatgaaaatgaaaatatcattaaaaatggtaattttatcaatggaactgaaccatggtatatcaataaaaaagataatacaaatggagtcgtagaagtaacaaatgaaggtgcacaatttaaagttacacaaacaaatgggaattcatgggagttaggattacatcaaggccaattggttttagaagatggctcaaaatatattctatcttttgaagcaaaagtagatagtgatattgaaaaaccattaagagttgtcgttgaaaatcaagatcccaattgggaaaagaacttagaagaatatgtcaatttatccaatgaatttcaaaaattcacttttgaattcactaagaaagtcggttctaaaaatcaattggctttttcaacaggatttgatgaaaatcttcatcatacatttacttttaaaaatgtttctttaattcctgcaccagtccaaaagattgatcattatttgttggatgaacaaaatggtacagctggtgttttaactggaactgaagaaaatgtaaaagtagaagtaacaaagacaaatcaacaattttgggatttatctttaaagaaaagaaatattcaattagaaaagaagaaacgttatgatttaagtttttgtgttgattctagtcaagctggaaaaatcagttttgatttagaaagtatgcaagattataataacaagacaattaaacgtcagatgttaaatttaaaagcaggagaaaatcatttttcatttgaatttttgcaagcaaatgatgatttacagaacttagtattcttccttagttatggtgatgggaatactgatatgacaaatgccaaattagcttttcatcaaataacatttaaagaagttgaggatttaagaaatacatatgttgtgaatggtggatttgatgatgatatagctggatggaaaatttctaataataatggaactgatctaaaagctgaagtgaaagatggaaaagctgtattatctgtttcaaatcaaggaaatgatttttgggatagtaagtttattcaagataggattgctgtgaataatggaaaatataaagtgtcatttgatattggttcaaatgttgaagatgttacccaagtttattttagtgtagaaagtacggatgttataaatgggagtgctaaaaaatatttgtgtgatgaaaataatcaacctattgctatttcattaaataaaacaaaagatatgaaaacatatagttttgaatttgatgtatcgattgaagaacttattaaatctacagaagatttaacaattcgttttgatttgggaaaaccttatgaaggaagtttagaagggaaagaactttatttagataatattaaacttgaaagagtgggagatttacaacaaaaaaatattgcacatacaaatgtagaatttgatgttaatcatgtgattacagaagattttaaggggttaggggttcaatgggatccttatcaagttcatccactaacagatagggaatggaagatggttactgatagagtggactacctcaatcctcagtttgtaagatgtatgatttatgcaacaacatattgcaaaggtgttgataaaaatggtaaaccaatctttgattttgaaaacaaagaaatgaagccattgattcaacagttagattatttacaagaccgtcaaattgaaactgtctttggtgaatgggaagcacctggtaaagttggtggagcttttgaaggaattacatgtgataatccagtttgggcagaaatgattgctggtttaatggattatttgattaatgaaaaagggtatacttgtattaaatattataatatggtgaatgaagctaattctgattggtcatattgtggtgattatgatttatggcaaaaaggaattaaaaatttacataaagaatttaaaaagattggaattgaagataaggttaaaattactggtcctgatacagtttgggatgggaatcatcaatggcttaaaaatattgaaaatgacccagacatgaaagaaaagattggtctttttgatgttcatatgtatccaacttatgatgagattacttctggttatattgaaaagtttgtgactgaacaaagacagacagttacaggacaagatttctatatgacagagattggtatggttactggaaaagttgatggtgatacacaaaaatatgctaaagaattttgttatggagctattatggcagatgctgctgcgcaggttttacgtggtggattgtcaggtgttgcgatttgggacttagatgatgctatgcataatcaaggaaacggttatcctgatagtgatattcgttcattaaaacaatggggattttggaattctattgcggggagagtttatcaacaaccagaacaagaaaagattcgcccacatttctacacatggtcattaatgacacatctgtttccacgtcattgtcaaattattcaatcaacagctgaaaataatttaaatggtttaagaactgtgggtatgaaattaccaaacggtgatataacatatatgattgttaataattcaaacgttgctaaaaaagtaacagtgaaagataatagtcaaatcacttcaagaaaagttttacaatataattattttgataatgatagaattgttaatgaacaaggttatccagttgttaaagaagttaaggaaaatgttaattttattaatggtgtagatgtagaattacctagtggtggggttgtctttttaacgacattggatacaaatgattatgttcaagaaactaaagttgaatttcataatatagatgctgatacaaatgaagcaattattggttcaaaatttgaattaagagatcaaataggtcatgttgttgatcaatggacaactcaagaaaaagctcatcaaattaatggattaaaaacaaatggtcaatatgtattggtacaaacagattcagttaaaggatttgttaaatcagaagatataaatattacaatccaagatacagttcaattacaaacatggacaattaaaaataaacatatgaagggacaagtgaatattattgtcaaagataaagattctcatgcattattatcagatgctgaatatttattaaaagatgaacagggtaatatcttggaagttttaaagactgatgaacaaggaaaagcaataagtcaattgtatgaaattgctcaatttaaaaatggttctatccaaaagaatttcatctattctttacaagctaaaggaaacttatcaggatatcaacaagatactcaaaaatatatgattgagtttgactcatttgatacagatatcacacaaaaaacaatcacaattgaactcatgaaaaaagcccaagtcgatatcaaacctgatgatcaaaaagatgaaccaaatcaggatattcctcaagacattgttcatacaagtgatagttcacaaataattttattatgtttatcaatgctgataactatcttattctttaatttggtttatctaaagaaaaaagataattaatcaaaaaaaattacgtggtagaaatacgacgtaatttttattttctttcacgatgatcaatgagtttatcagcttcaacttttgttttcaatgcttcatcaaaatgtttagagaacaatccagcataaagaatatcaaaaataagatgaatagaaattgttgaaccaatagtagaaatcttattataaatctgttcacgactatcaagatgaagcacatattgacaataagcagataatttattatcacctagtgatgtaattgcaatcataggaatctttttacgtttaagaatctgtgcagctttaatcacttcttctgtttcaccagaataagaaaccaggatagcacagtggtctttttgactccttgcagcttgaaagagctgttcatttaccattggagcaatctgaacatctttcccaattctaaacattttatattgaaaatcactcgccattcttaagggaccagaaactccataaatatcaatcacttgagctttatctaataagataagactttgacgtaaatctttttgattcaataattgcattgtttcatcaacactctctttaaagagtttagcaatattattggcaatatgggtaatattggtattcttatcaaatggaaagttggcattaatactatcttgatgagaaagaacatattggatatttgctgataatgaaattttgaaatcattataacctttaaaatcaagcttttgacataaacgtgtaatagttgccggggatgtatatgtttttttagcaagctctatagttgatagatttaaaacttcttcactgttttgtaaaatatattgtgcaatagatttttccgattcagaaaaattttcagcaatttcaagtttttttaatagactcataacataacctcccaatctgaatatagtataacatttattgagaaaaacgagaagtcatatatagtcttttttgaggtaatatgaatgattgaaaggttatcgtaataatttgttgataatgtttattttagttgattttatgaaataaattagttataatactaaagtcaaatcgttgaaaaagaaaagtatttatactttcctttctagagaggaaatggttggtgagaatttccagggaaatataaagaaagctacttttgagagtgatgtaaacatcaacgcatggtcagcgttatcgacttagagagcatagtcatatgattatgaataaggatggtaccgcgatatcagtcgttccttttaaaggaatgactttttttattaataagaaggaggatattatgaaacaattaactggaaatcaagtgcgacaaatgttcttggattattttaaatcaaaaggacatatgattgaacctggggcatcattgattccccaaaatgatccaacattattatggattaatgctggtgttgcagcattaaaaaaatactttgatggaagtgaaaccccagcatgcaacagaattgccaatgctcaaaaatcaattcgtacaaatgatattgaaaatgttgggaaaactgcaagacatcatacattctttgaaatgttagggaacttctcaattggagattactttaaagaagaagcgattccttttgcttgggaatttttaacaagtgaagaatggattggttttgataaagataaattatatgtcactgtttatactaatgatgatgaagcttatcgtatttggacagaagtatgccatgttgatgaaagtcatattttaaaaactgatggaaacttctgggaaattggagaaggtcctggtggtcctgactcagaaattttctatgatcgtggagaaaaatatgatccagaaggattaggagaaaaattgttttttgaagaattagaaaatgatcgttatattgaagtttggaatgttgttttctctcaatatgattgtaatcctgccattgatagaaaagattataaagaattaccacaaaagaatattgatactggtatgggattagaaagacttgtcagcattattcaaggtggagaaacaaactttgatacagatttcttcttaccaattattcatgcaactgaagctatgactaatgtgaaatatgaagataataaaatggcttatcgtgtaattgctgatcatattcgtacagtaactttcgctttaagtgatggagctttatttgataatgctggacgtggatatgttttaagacgtattttaagacgtgctgttcgttatggtaaaaagattggaattgatcattcatttatgtatgaattggtttatgttgttgctgatattatgaaagatttctatgattatttaccagcaaaagctgattatgttagtggacttgtgaaaaaagaagaagaagcttttcataaaacattatcaaatggtgaaaagttattaacacaaatgttaagtaaagctcaagatcatcaattaaatggaaaagatgcttttaaattatatgatacatatggtttcccattagaattaacagtagaaattgctgaagaatcaggtttcacagttgatgaagaaggatttaaagctgaaatgaaagctcaacaagaacgtgcgagaaatgcccgtggggatgtagaatcaatgtcatcacaaaaaccagatttaatggcatttgatacaccttcagtatttacttatgatccaacaccaataacagctaaagtaattgcaacttttattgatggggttaaatgtgatgaaatcacagacaaaggagaaattatcttagatcaaacaacattctatgctgaaatgggtggacaatgtgctgatagtggaactatgtcttttaagacaacgaaagttcaagtgaatcatgtcacaaaagcgccacatcaacagcatttacatatgattgttgtagaaagtggaagtgttaaagttggtgatgaattgacattatatgttgacacacaaaaacgtgccttgattcaaaataaccatacagcaactcacttattacaaaaagctttaaagaatgttttaggtgatcatgtttctcaagctggttcttatgttgatgaagaaagattacgttttgactttactcatccacaaaaaatgagcgatgaagaaataagaaaagttgaagatgaagttaatgctcaaatctttaaaggcattgctgtagatattaagcttatgagtaaagaagaagctatgcaatctggagcaatggcattgtttaatgaaaaatatggtgatgaagtacgtgttgtcagtgttggagattattctaaagaattatgtggtggatgccatgtttctaacagttcacaaattggtttatttaaaatcatgagtgaagaaagtgttggttctggagtaagacgtattgaagctgtaacatcttttagtgcctatcttgctttaaagaagaatgaggagacattacaaacaattggtgatttattaaaattaaaaaatcgtaatgaaattgttgagaaagtaactcattatattgatgaagctaatgctgttaaaaaagaaagagatcaatatttagataagttaaatagtttagaagcaaaagaaaaatctaagaatattgaagaaattaatggggtacaattcttatacatcactgaaaataaagatgctcaaacagcaaaagctatgacttttgaattaagagatcaattacaaaatggattggttttaatggtaagtgaatatgatggaaaagtttcatattttgttggcttaactgcttcaatggtacaaaatggatttaaggctggaaactttgtgaaaatgattaatgaagtgactggtggtagaggtggaggtaaacctgactttgctcaaggtggatgcgcttctatcgaaggaattgaacaagcaattgcccaaataaaagcacaattctaaacacttttgctagcaatttttaacaatatggtgtaagatggattatatagacaggaggtatgtgctatggcaaaagattttactcaaacacgtctatttaattcagaagaaattaaaagagaagttattcattctaatttaatgacagtttctcaagcgttagatgaaagaggatataatgcagttcatcaaattgcaggatatttaatttcaaatgacccagcttatatttctagccataaaggtgctcgttcaattattcaacaaattgatcgtgatgaaattattgaggaattagttaaattttatttggagtctaaatagtggaaaaaatattagggttagatttaggttcaagaacgtgtgggattgctatgagtgatgctttagggcttattgctcatggagtagaaacatatcactttaaagagaatcattataaaagtgcagcgtatcatattaagggtatcgttgaagaaaatcaaatccatacaatagttctaggtcttcctaagcatatgaatggagatttgggcgaaagagcacaaatctctattgattttaaggaaagacttgaaaaaatgatggatgttgaagttgttttagtagatgaaagattgacgacagtggttgcagaaaatcaattaatttttgctgatgtatcgagaaaaaagagaaaacaagtcattgataaaatggctgctgtacagattttacaaggttatttagatggtcaaaggagatagacatggacgtaaataaaatacaagttattgatgatgatggaaatgaattagaatttgaagttctattcacttttgaaagtgatgaaactggaaagaaatatgtgttatattatgatgctaatgatgaagcacctcaagtttattcatcaatttatgatgatgaaggaagcttatatccagtggaaacacctgatgaatgggaaatgattgaagaagttttcaatagctttatttctcaagacgatgatgaagaagaaacaaatgaagattgctgttgtcaaaaagcagatcatgagtgctgtcaggggcatgatgaagaagattgttgctgtcaaggtgatgatcatgaatgttgtcatggagaaagtcacgaataaggtaacgaaagttaccttttctttgtttatcaaaaattcataaacatatggcataatagaagcattaaggaggatttattatgggattgttttttaataaaagaaatgttaaaccagtttttgtcggaagctatggaaatgatttaacaagaggtatgtatgtttttcatttagatgtagataatggtgagtttttaaagaaaaagtattataaatctttagccaatccaacagctatgtttaaacgtgaacgttttatttatgtgtgctataaaaataatactggacgtaagactgatggtggtctttggcaatatgcatctatggaattacaatttggtttagctggtaaagcaactgatggtggaaagacatatatggattgttttgttaatgaaaatagaagtaatgcttatgctgttgattattataatggtgaagttgtgagaatccctattttaaaacaaaagattgttactgttgcacaaagaattaaacatgaggggagtagtgttgatccaaaacgtcaaacagaggcacatcctcattttatcgatgaaacaccagatcataaaaaaatatttgtatgtgatttaggaacagatgaagttgttatttataatttggatgataaaggtgcattagaaagagatgaagaaaatacatttaaggtaaaacctggtagtggacctaagaaaatggtttttgctccgaatggaaaatattcttatgtattaaatgaattatcaaatacaatttgtgtttatcaatatcaagatggtcattttacttttattcaagaagttgatacatatccaaaagatgaatttgctaaagaaaatttagctggggatattgttataagtgaaaaaggtgattatttatttgtaactaatcgtggacatgattctattgtagcttttgaagttaaagaagatggtcaattggaatatattgaatatttagatactgatgaaaatccacgtgcaatgattttagttaatgatcgttggttggttgttgcttcgcaaaaaggtggaacaattgaatcatttgaattaaaacgtggtgaatcaaaaggtgtattgtttgaatcacattttagttatatggttggagaaccagtatgccttattgaaggtagaggtatttagttatattgaggttgaattgcttattcaagtgattcaactttttgtttgcaaaaaaaggatttaaaatcctttagatgagcttatattttgcttttaaacgtaatatttttaaaacactatgatttaaacgggtttcactgatttctttgttttgcaccgcttccttgattcctttgaaagcttctttataatcttgaggcatcaataaaatatcattgccggcttcaaaagcttgaactgcagcttgagaagacgaatattgattggttattgcctgcatggctaaagaatcagtaataataataccatcataacctaactcatttttaagtttctcactgatcatttcataagataaagaagaagggagatgatcatttgttacttgtaatgcagtaatatgagaaaccataatcatatctgtatgactttcgatgcctttaagaaaaggaatcaattcacaattttgcatatcctgccaagtttttgacgttgtcgcataaccaagatgcgtatcagttttggtgtctccatgccctggaaaatgtttgatacaagtcatcatattttcactatgaaaacctttgatttcttcactgaccatttgtccaaccaatgtggcatcacggccaaaagagcggactccaatcactggattatctggatttgtattgacatctgcaactggagcaaaatcaaggttaaatgaatattcattgaggtaatgcccgattgtttgtccaacttgataggcttgattttgatcattagtctgaccaattgttgccatgttttgatactgagtgacatgaaagtttttgttgttggcgactcgactaacacttccaccttcttcatcaattcccattaataaatgaattgaagatgctttttgtagatcgtgtgtaaaagtttttatttgatcaggatttaaaatgtttttagaaaacatacaaataccaccaacaggatagttttgtaaagtatctatcatagattgagataatgctgtaatgccatatcgactaggatcatgaacttgactagccgttagtgatgaatctaaagattcaggcctgatgataaataattgtccaattttttcttctaaagtcatttgttctaaaagttcttcggcactatcatattttttttcgtctgctaaaactgagacagtcggcttttcttgtttttgacaagcagttattaaacataaagaagttattaaaaaaaattgtaaaagttgttttgttttcatatgttttatctccttaattatattgtatatgaaatgatagaaatgagcaaaaagaaatgattgaaggtcgtaaaaagagatgttttattgataattgttgtaaaataacctataataataaagatggaggatgttttatgaaaaataaaaaaaccattttaataattattggtgcagttattgtgattggaattattggttcaatttttttctataatcatggtatttcagctgtatcatcaaaagatgaagaagtcattgtgaaaatagaagcaggctcaaatgcttcacaaatgttagaggctttagatcaagcaggacttgtgaatagtaagtttgcaggtaaactatttttaaaattcaatcattatgatcatttagaagccaatacatatatctttaataagaatatgtctttatcaaagattttttcaattattgaagatcctgatattgaatatattttacaatcaaaattaaccattaaagaaggaaatacaattcctgaagtggcacaagcctttgctgatattttaaaaacttcaaaggaagatgttattaaacaatggcgacaagaagattatttgaaatctttgattaaagagtattggtttattgataagagtattttaaataaagacattatgtttccattagaaggatatctttatccagaaacttattttattacaagtgaggaacctaatttaaaagatatgacaaagttagctttggatatgatggataaaaaactaacaccttttaaagaaactattaaaaagatgaattggacaccacatcaatttttagcatttgcttcagttgttgaaagagaatcaggaactgatgaaacagatcgtccaatgattgctggagtctttatgaatcgcattaatactggcatgaaacttcaaagtgatattacagttaactatgcttggcagcgtacaggtgttacagtatcaactgcacaaacacaaattgattctcaatataatacatatcgttatgcaggattgccaattggaccaattagcacagttcctgaatcgacattaaaagcttgtgcaaactatacccatcatgattatttatacttttttgcaatgaaggatcctaacaatcctaaaaaagcaaaagttgtctatacaaagaattatgatgatcatttaaaagaagtgaaaaaagcgaaggatgcaggtttatggttagagtaatggatttagaagaattagaacaagatgcacttaaaagaaatattcctgtgatgcaaaaagagggaatcctctttttgatttcacagcttcaagacatgaaggcaacatcttgcttagaaattggctcagccattggttattcagcaatgatgatggttacacatgttgaaggattgcaggttgaaacaattgaattaaatgatgaacgatatcaagaagcagttaaaaatataacggaaagaaacttacaagataaaattactattcatcatgatgatgcgttaagttttgatgttgcacaattacaacatgcaccatatgattgtctttttattgatgctgcaaaggctcagtatcaaaagttttttgagaagtatgttccttttgttttagaaaaaggaatcataattgttgataatttagattttcatggtatgatttttgatattgaccatattaagaatagaaatacaaaacaattggttaagaaaattaaaagatttaaagattggatttttaatcatgaagattatgatgttgaatattatcaaattggtgatggtatttgtgtgattaaaagaaaggaaaaagaatgaaaatagtattatcattaaataatcaaaaaagattatatgactatattgatatgggtattgatacctttgtattaggggggaaatactcttttcattgtccatatgtattttcattagatgagatagcaacattaactcaaaaatatccacaatgtatattttatgttgctgtgaatgctttatatgatcaacatgatatcaaagatgttgaagattatatcaaggctcttagtcaaatgaatattcatggactcttatttcaagattatggggttttacaaattgttaaagattatcaatatcattttgatatgatgtattcaccagagacattaaataccaatgcttgtacattaaatgtcttaaagtctcaaggtgttacaagtgcatttttatcacgtgttatccctttgcaagaacaattagccatctgtcatgatgtgaaaatgccattaatgttacaggtacatggggttgaatatattgctgcaagtaagcgtgaattgttatcaaattatcaagcagcatcaggcttatcttttcaaaataatggaatcgatcatttaactttaaaagccaaaaattctgattatttattacgtatttttgaagatgaaaaaggaacacatattttttctgatgcaagattatatactttggatttattgaatcaaattcatgaatttgattatttatatattgaaacgttaatgatgaataatgaagaagctattgagattgcttcattgtacagtgatgctttaaagagttatgaacaaggaacatatgatagagatattaaggaatatatggatcttttatatcgcttaaagacaccattagatagaggattcttatttgatcaaacagtttataaattagaagatatgaggaagatggacaatgagaaacgtgagtcaaatcgttaatggaaaaagaaagattatcaaaaaaccagagttattagcaccagccggtaatttagaaaaattaaagacagcaattatgtatggggctgatgctgtttttgtgggtggtaaagagttttctttacgttcacaagcgtctaacttctctatcgaagatatcaaagaaggcgttatttttgccaaaaaatatggtgctcatatccatgttacatgtaatattattttacatcaggacaatctaaaagggattgaagaatatttacagactttagatgatattggagtcactgctattattgtggcggatccttatattatgaagattgctaaggatatggatttaaatttagaagtgcacgtttctacacaattatcaactttaaacttaaaagcgattgaattttatcaaaagatgggaatggatagggttgttttaggacgtgaagtgacttatgaagatttaaagtcaattatggaatatgccccagttgatgttgaatattttattcatggagcaatgtgtattcattattcaggaagatgtatgttatcaaattatttaagtcgacgtgatgcaaatcgtggtggatgttcacaatcttgtcgttggtattatgatttatatgatgatggtaatttagtgaatcaagaagctgatatgccttttagtatgtctagtaaagatatgtcattgattgatcatattggtgaattgattgaacttggggttgattcgtttaagatagaagggcgtatgaaatcattgcattatattgcgacagttgtttctacatatcgtaaattgattgatgcttattgtgaggatcctgatcattttatacaagatgaaagttatcgtcatgaattattaaaagcggctaatcgtgctttatgtcatggttttttctatgaacatccaggtgttgaggaacaattgttcaatatgcgtgatgaacatccgactcaggaatttgtgatgcgcattttagattatgatcaagaaaagcatcttgctaaaattgaacaacgaaattattttaaagtgggagatcaaatagaaattttttcaccacatcatcctaaccttttctttactgtcgaaaaactttataatgaagataaagaagcagtagaagtagctaatcatccaatggaaattctttatgttgaaatcaatgaaaatgttttagctaatgatatgggaaggaaggttatacgatgaaagaagcaattattattggtattgctggtggaagtgcatcgggaaagacttcaatcgcaatgcagttatatgattattttaaaggaaatcataaagttaagattattaaacaggatgattattataaagatcaaagtcatttaacttttgaagaaagagttaagacgaattatgatcatcctttagcttttgataccgatttattggttgatcatttaaagaagttaaaaaacaaagaaacgattgaaaaaccaacatatgattatacccttcatacaagaagtgatattacagaaacggtagagggtagggatgtcattatcttggaaggaatctttgtattggcggaagaaaaagtcagagcattgtgtgatatattggtttatgttgatacagcaagtgatattcgtttcataagacgtttaaagcgagatattgaagaacgtggacgtagtgttgactctgtgtgtaatcaatatttaaatacagttagaccaatgcatgagcaatttattgaaccttctaagaaatatgctcatattattattcctgagggtggaagtaatcatgtagcagtagatttattaattacaaaaataaaaagtattgttgatgagtaattcacaataaaaatcattgattaatgctagtaattttatttcatttatgttatagtatagttcgcgaggtggataattatggatcatgatgcagtattattaacccaaagtggggttgaaaagttaaaacaggaaaaagaacaattaattaacgttgaaagacctaaggttattgaagaattgcaattagcacgttctcaaggtgacttgtctgaaaacgccgattatgatgctgctagagataaacaagctcatatcgaagcaagaattaaagaaattgatcaaatgttattgcatgtgcaaatcattgatgaatctcaattagataatacaattgctaaaccaggagcaactgtgacaatcttagacttatcagaagaaggtgctgaacctgaagcatatacaatcgttggtacttttgaaactgatcctttaaatgggaaaatttcaaatgaatcaccattagctaaagctatcttagatcatggagttaatgaaattgtatctgtaggggttgctgaaccttatgaagttaagattttaaagattgaatatatttcttaagatgatggcaacatcatctttttatatttttagggggataaaaatatggataagaaaaaacaaatgtctgatacaatgcgtttaggggtgttattagcgattgctggtggctttttggatgcttatacttatttatgccgaggcggggtttttgctaatgctcaaacaggtaatatggttttatttgggattcagctcgttagtggagaatttttaaaagctttgtattattttttgcctattctatcattctttgtaggaattattgtagctgaagctattaaacatcattttcgtgaccatccaaaatttcattggcgacaaattgttttattgatagaagtttttgctttagtcattgttgcttttataccacaaggagaattggatatgttatgtaatatcatgatatcatttgtttgttctttacaagtggaaagttttagaaaatttcatggaatgccttatgcatcaactatgtgtacaggaaatttaagaagtgcaactgaacatctttataattatcgtatgactaaagataaaaagactctcacaaagagccttcaatactatatcattattgctttctttattggtggtggggcattgggtgttcttttcacccatagtatttcgatacaagctatcttattaccagcacttcttttatttatttgttttatatttatgtttattgagcaagctggatagcttgtttttattttcttgtttttaattctttaaataaaccaatagccataaataataatgattttaagaaaagatgtaaataattaatatttcctaaatgcatcaataaacttaaaagaaaataaattaaggtaaaacataaacaatgagataatcttttttgtgtaatagatgaggtaaaataaagtgctgcaagaattaataaagcataagaaatgatttgaatagtcacattcataacaagtgaatttgtttgcataaaataagagagtatggcaagaataaaagaaatcacaacaaagggaataagaaataataatatagtattaatataagtacgtattgtttttttcataggttcctccttgtatattatatgaaaaggagtttgttttatgaaatatgtagaaatatttattgaatgtgttgccacatatttttatttggtttttttattaagatatcttggtaaaaaagaaatgggtaaattaagtgtatcagacttaattgtttttttattgattagtgaattaatgacaatatctattggtgatgataatgttaatttctttcatggagccttagcagcgcttgtcattattattttagataaattgtgttcatatgctgccttaaaatttaaaccagttaaaaaggttttagaagggcatcctacatttattgttaataaggggaaattagatcaaaagaagatggaagcattgaattattcagttgatgatttatgtcatcatttaagatcacagggaattggttctttatcagaagtggaatttgctattcttgaaactgatggacaattatcagttattgaaagtcaaaagaatcaagtggaaatgcctgaatcattaattattgatggagaaatcaatagtgaaatcttaaagatgatgggaaagaatgaagattggttaaaaaagaaattacgtcaacatggagttgatgactatcatgatgtcttttattgtattttagaaaaagaaagattattttttataaaaaaataggctagatatctagcctaataacattctatcattaacaaattcttcacctgtggcttcttcaaatttttttaataaatcagcaacagttaatttcttcttttcttcacctttgacatcatagatgatatgaccatcatacatcataattaaacgatttccaatatcaatcgcatctttcatattatgtgtgaccatcatagctgttagattttgttttgcaacaatttcattggttaagtttaaaactttagcactggttgcgggatctaaagcagccgtatgttcatctaataacagtaattttggtttttgtaaggttgccattaaaagagttaaagcttgtctttgaccaccagaaagaagtccgactttacttgttaaacgatcttctaagtttaatcctaaagttttgactaactcataatattctttcttttcttctttgctgacaccccaagctaaaccacgatgttttccacgtctttttgcaagggcaagattttctaagatttgcatattggcagctgttcctaacattgggtcttggaatagtcgacctatttttttagctctttgatattctggctgtaaagagatatcttcaccatctaaagttataattccacaatcaagaggataaatcccagaaatcatattcaataaagttgattttccagctccatttccaccaatgatagtcacaaaatctccttctgctaattctaaatcaatttcatggagaactttcttttcattgacagttcctaaattaaaagttttactcactttttctaatttaagcatctttagaaatctcctttcccgttaattttttatacatcgccacttgtctttgtttactcatcatcattggaatcgttaaagcaataccaaccaaaatagcagttaaaacttttaaatcatcagtatttagtcccatttgtaaaaccacagctactataatacgataaataatagaaccaattataatagaagcaagtcgtaaagcaaaaccaccttttttaccagaaaaaataacttctccaataacaatagaggcgagggcaataacgattgctccagttccaatacgtacatcagttgcttgaccatataaagcataaagtccaccagataaaccaacaagtccattactaatcattaaacctaacaatttcattgtatcagtattgatacctaaagatcttgccatttgttcattatttccagttgcgcgaatagatgatcccatttctgttccaaagaaccaataaagcaaagcaataaacacaataacaaataataaagaaataataagggcaatataatatttattaatatctaaagccattgataaatcagtaaataaagtattagctgtcgttaaaggtaaattggcacgaccacccataattcttaagttaattgaatataaaccaatttgagtgaggattccagctaagatagctgggattttgcattttgtatgcaataatccagtaatcgctccagcaacaaaaccagaaagaatagcagcaataatagccagcaaaggatgaatgccatttaaaacacaaactgcacaaactgctccaccagttgcaaagctaccatcaactgttaaatctgcaatatctaataaacgaaatgtaatatagacccctaatgctagaaagccccaaattaaacctaaatcaatagctcctagatacgtataaaataaacccatttttcattctcctattctatgaaagttgcttttgggtgatcttctttattgattgtaatgccacattttttagcaacttttaaattaataaccattgtacaatcttctgcttttaattgaacaataggtgagtcagctgcagtcttttctccttttaaaatagcaacagcctgttccccagctaatttccctaaattcgtataattaataccatatgttgcaaatccaccagctttacacattccttcttcaccaacaatacaaggaattttagcttgtgatgtaatagcttccacactactcatataagttgctagtaagttatctgtaggaatataaacaacatcaaccccatcatttactacttgtgaagtgactgcttgaatatcattagaatcagaaactttataaacttttgcttcaagtcctttatcttttgcagccttttgagcaagattaccttggaaaatagaattatcttcactaccattatacataattgcgacttttttagcctttggtaataattgtttcattaaatcaaattgttcttgaattggagttaagtcacttgctccagtcacatttccaccaggcttttcattacttttcactaaaccagcacttgcataatccgtaatggcacatccaataataggaatatctttactagctgcataagctgcttgtgcagcaggtgttgcaattgcatagattaaatcattgccatcattgactaatttatcagcaactgttgcacagtttgcctgatctccagcaacttgataatcaatattatcttctttcactccagctttaagcaaagcatctttaaaacctttataagaagcatctaatgcttcatgttgcattaattgaataaccccaaccttagcttttgataaatcctttgctgttttttcacttgaagaattccccgttccacatcctgttaacattaaacctaatgctaataaaccaattgttaattttttcatatttttttcctccccattcatcataaaaacaaaaaaactcgctcataagagggcgagttgacgcggtaccacctcagtttattataacttcacagttataaccttcataagttagaaactttcataaataacgttatgaccccggttatcccttatcaagataacaactccgtggtgtattcaaaattccccagcgtatgatttgcaccaaccatcatatctcttatgtcgcaagaatttttactctgtcacatcttagcttttgtttttattgaagtatacgccttaatcataaaggaatgcattttgtttgtcaataaaaagatacagaataattttattttttatatacaaatatctaaataaaacaaaaataaatacaataatttaacaaattcataaaaattaagatagcataatatccaataacatcatgactaaaaatcctgccatacaagaaatagctccaatatcaatttgatttttacatgatgcttcaggaatcatatcttcaacacatacaaataacattgctccagctgcaaaacttaatgcaaaaggaagaatattattaatcgcggtggcaaagatataaccaataatcgcagatggaatttcaataatgccagaaaattgaccatacatcatagctacaaatttactcttaccatattgatgcatcggtaaagaaatagccgttccttcgggaaagttttgaatacctattccaattgataagataagagcaggaatgatattgtgttgggcacaagcaaaagcaactcccacagcaagaccttcagggatattgtgtaatgtcatcgctaacatcaacaattgattctgggataacttcgattgaactccttcaatttcatgagacatcatatgctcatgcggcaagaaatgatcacagagggttaaaaataaaactccacagaaaaaaccaaaaggaataatcaataaataccatttacttaaaccatctaataaatccattgctggtagaatcaaagaaaagaatgatgcagcaatcataattcctgcactacttcctaaagcaattgatataagatgctgattttctttattggtaaaatagactaaagctgctcctaaaaaagttgaaagccagttaaagataatcgctccaacaaatattaaaataggcatcttttcaagtaaagataacatattttcacctctttataagctatgcttaaatcaatgagaagtgataaaaaaagctgtgaaatcacagcttaatagttaatatcttcatataaagtttttaataaaatagcttttgttgtaggacgttgttttttagcatcaaaagttttcataacgctatattctacaacatctcttttttctacaacttcatcatagatataatctgcttgtctaaagaatagattatcatcatcatcttgataaatacttccaaattctttatccttgttgtaataaacaactttaccttcatatctttcaatataagcatctaaattttccattaattgattatagaaacgatcatataatgtactactattcatatccttatattcatcactaatactagctccagttaaatctttacctgtttcttctttaaccttataaacaaatgcatcagccaatgcagcaacttcactgtttttacctgcatgagtcatttctaagattttttcatataatgacaaatgttgaacattatatccagaagtaaagaacttataaacaagatttgtataagcttctttttctttaccagtattcatataaagatcatataaaacttcaaatgaatcaacattaggaattctatttcctaaagataaaaattcattttcagcttcttcatatctctttaattgaactaaagaagaagcacgataatatttaacccagtttaaattgttataatgccatttaataggttgagcaaaagcattgtttgcatattcaacacattttgcataatcacctaattcatatgaacatcttacttttaaacgataccatttttcttttttagattcatattctttacctgcattattgataaatggatcaacacttaaagtttgaacatctaatttatctaataaatcagaaatctttttgtaatcaacaggttttttattcataatatatttcattgctttgttgattgttgcttctaaaggagaatatttctcttgtttacataaagccgcaatttcatcaacgatagaaaagaataaatcttctttttcactgatttggttttcatcaatattaatgaatttattataaagggcataaccataatgattaataaaaccagttaatccttcaccaacttgtaagaaagttcttccaacttcaattgcctcatcgttgcgtccttgattttttaattctcttacataatccatagcttgaaaatcattaaacgagctaggatcttcttcaaaacgtttatcataatttgttaaatcttttggttcacgtttttccacgattcatcacctcgactattattatatcaattctaagactccttgtgaagaaaaaataaaagttttgaaaacgctatcccgatttctttgatttattttcccttttatagcgataatgcatacaaagcatgatatcgacgaattaaatattcaacaccaaaaatcatcgcataagggccacattctaaactgttttcttgagaaaaggtaataactttatcaaataagggaattgctggaatagatttgttttgagttaataaaacaagttttgtgtgtttttgttcaagcatttgaattaattgttgattttgagcaatgaaattcccataaacgcttatcacaataacaagatcttggctggttattgtttcaattgttttttcttgaatttcataagtatctgggcaaatacaaagtttacctaaatgtaagaagttatcttgcattgttaaagctaaattttttccaaaagaataaccataaagataaatttttttatgctgatgaatatcttcaagaagttgatcaatagcttgaatatctatatattttgcactttgacaaatgactttagaaatttgttgactatagttttcaagatatttttggggattttcttttaataaatattgctcagttttatacatatgaaagagaatttgggtagattgctgagtcatcatttgaaattcatttttcatagaactataatttttaaacccaaaagtctgtaaaaaacgcgtcattgtcgaaggggaaacataacatagttcagcaagtttttcgatctttaaagtatctattttataaagattttcaaagagtgtcacaataattctatgatatgtatcatttaatgttgttttattaagataatttaataatttttctgtatccatttttatcacctactgtgattcattataactgattttctagctttttaaatcttttttcatgattatgaaaaaaacagataaaaatgaaaaagctgttataaacataaaaagaacatctcatatgttttgttataattgaagtagaataaggaggagaaaagataatgagtataccacatattgaagattattatcatacaaaagtattaatggttgatgaccaaccatttctggcttatgctggagaaattcataattctaattgttctcaggttgattattttcgtgagcatgttttacctaagattaatcatttagggttaaatacagttattttaccagtttattgggaacaaattgaaaaggaagaaggacaatttgattttcatgtttttgatgaaatcattgatttattacgtaaagaaaatttaaaagctgttgttttatggtttggattatggaaaaatgcaaaatcttcttatattcctgcttggatgaaagaaaatcgaaagacatatccttttataaaaaaagaagatcaaacaccaatttatacaattacccctttatgtcaagaggctatcgaaaaagatggttatgctttttttaaattaatggaacatataaaagaaaaagatcaagttcatcaaactgtaatcatggttcaagttgaaaatgaaattggttgtttatcaacaaatagagattatagtgaaaaagcaaatgctatgtttgctcaagaaataccttctgatatgcaaacattgatgtcaaaaaaaggaacgtgggaagaatgttttcaagcagatagtcatgaaatgtttatggcatatcattttgcaaaagctattgaatatattgcacaatgtggtaaaaagatttatcctttaccattgattgttaatgtttggttgaaaaaaccacatgaaaaagcaggacaatatccgagtggtggacctattcaagataaaatagatttatatcattatttggctccatcgattgatcttgtttgtccagatatctatgtgacaaacttccgtgaaatctgtgatgtttatgcgagtcaaggagcgttattcattcctgagacacgtcaagatattcattatataagtcatgctatatatgcttatacacaatatccatgtctaggttattcaccatttggaatagaagattttgcaaatgaagatagtcaggaaacaaataatcgtcatattatgaaactattaggaattgttaaagaagcatttcatccagaaggaacacaatattatttaaaaaagatctatcaacaactttcttcttttgaaaagattttgttaaagaaaagaggaacagatgatttatggtcatttttaaatgataatgaagaaaaatgcattgaaagaacaatgaatgatttaaaaataaatgttcaattccttgataatcaagattgtttaccaataggagtaggttgtatcctcaaagaagataagtatttgtatatttatggaatgaggttttttgcaagtttattttcattgaaaacaaatgaatatattggtattttggaattagaagaaggacattttgaaaacggacagtggattgttgagagagtgcttaatggagatgaacaatattttattgccgttggcaataatcctcgatttttaagagtccattatcatcagtatagtgaataacaaaaacgagtagatatttgatatctgctcgtttattcattttggttacgataatcttgaggggtatagcctgtgtattcttgaaatcttttataaaaagatgttaaattatggattccgacttcacttgcgatttcataaataggtaattgtttgttttgtaaaaggataatggcttttttcatccgttcttcattgaccagttgtttaaatgttttccccgagaattgtttaattaacttgctggtataagaagggtcataaccaaaatgcatacacatatttttcagattgccatcttgataatgatgatggatatattctaaaatatcatccatgagtttttgattcttaaataaacttactgaaagatttgtattgtattgaccttttcttgcgagatgagtgattaagatcataatataattatcaataatttcatctgaagatgtcataggatcaaaatgttcacaaagaatattttgaatacaattatgaatgagttgatcttgtttggtataaaacaataaataatgattatgggtattttgatgattcatcagttcaatcataaattgagtaatcaattgatcatgtggtaaatgattaataaaacgatgagcaaaataattatcatttaaaataatattaattcctaaatcattttcacctgtggctgctacactatgaggaacatgcttatctaaaataataatatcaccttgatgaagggtaatagtttcatcctcaacccgcataataagagttcccgaatacacgtaagtcatgacaatatagtgaaaaatatgcattggtacacaaccactttttcgttggtgtaaattaataatatgattgtgattttgaaattctctttcatgatggaaaataaacatgatatcattttgatagggcacaacagtaaatttttgtttaaaatgatctaagagttcttcatcacttgtattgctataactgataggactttgtaggatattttctaattcttgatagttcataatcatcacctttatttcattttatcatgataagtcgaattttgatagtcttaaaatcttataatgacattgtgaaagtaaaaaataactcttataataggggtgtaatttgtgatgaggccaaatcaattacattatattgtgtaaaaagtaaaaatattgaaaggggaaacactttttatggaaaagaaaaattcgttttttgatactctccaagaagtacttggaaaagtttcagtaaaattaagtggaaatatttatattaatgcaattaaagatggaatgttggcatatatgccattcgcttttattgcctctattttcttaattatcgctttcttcccagttccagcttttaccgattttgtgagtaatatcacagggttaaaagcaggaatatggcaaggtaaattagctttggttaatgatgccagtttaggtattggtggtttacttgttttacttgcaatctctagatcattagctgataaattaaatattaatgggatgcaagtgactttaacttcggttgttgcttttgtgttgttggtgccatttggttctgataagagtggaagttttattgctacaacatatttaggggctcaaacgattttcttatcaattattatttctattgttactgcgaaagtttatcaatttattgatagaaaaggaattaaaatcaagatgccagctgcggtacctcctgctgtctcagcaccatttgaatcaattattccttcgttagtggttattacattattttggattttaagattagtgattgatgcattcaatggtggtagtgctttagctattttcaatactgtattaggaatgcctttacaagctgttggtggatcgcttcctggtattatcattgtgaagatcttctcacaattattatggttctttggaattcatggtgattctattgtcaatggtgttatgacaccaatcttccaagttttacaagatgcaaataaaacaatttcgatggctgggggaactccgacaaatattatttgtcaaagtttctgggatagctttggaggaattggaattgttggttcgattattgcgattattcttattgccaagagtaaacgttataaagaaatgaagaaaattgctggggttccatatattttcaacgttggtgaacctacattatttggtattccattaatgatgaatgttgtttatttcattccatttatcttaagtaatgttgtctctattttaattgcctatgctgcctttgctttaaaacttgttcctgtatgtactggtatagcccaagtcccttggacaactcctttaattgttagtggatatttaacaactggaagtgttgctggttcaattttacaaatcgtttgtttagtagctgttgtgttattatggcttccatttgttaaagtagctgataatcaaatcttacaagaagaaaaacaattagaaagtcaaatgaaagaagaaactcataaagaagcataatgcttctttatggagtttagaaaaagagatgatatttatgaataaaaattatcaatttcaaggttgttggatgaaaggtaatgatattgattatggagtagaagatagtgggtattatcaagatcatcgtaatgttgtcttggttaaagacttttatcttgatgatatccaagaaacatatctttatatagcgactcttggatattcaatcatctatattaataatcaaagaataacacaagatgaattgaatcttgtttggacacaatttcaaaaatgtgtttattatgatcaatatgatgtcactccttatttaaagaaggggcaaaatcaaatgaagattgaattaggaaatggaatgtacaatccctcaccattacgtttgtttggtaaatacaatttaagagaaagattaagtgaagttggagaaccaaaagttctttgtgatcttgtgtcttgcaatcaagttattttatcaagtgatgcttcttggaagcaaggagaaggacatttcttatttaataatctttatttaggagaacgtgttgatttacgtcttgaaatgtcatcattaaaaccagttgaaacaaaagaaaatacgtatcatttagaagctaattttattccgcatgtaagaagatttcaaaatattcaaccagcaagtcttatagaaacaaaagaaggaatgattgttgattttggtgaaatggtttcaggttttataaatctatcttttcatgctcaaagtggacaatatgtgaagcttcaatatagtgaaagatgtattgataatcagatggattataaaacatgtttagctggaagtgttggtgaaggtattcatgattttgtaatttcaggaggattaggagcaccaaaaaaagccattcaaacagatgaaatcatatcaaaagaaggaataaatcattttaccaacacatttacttatcattcttttagatatgtacttattcaaggattgtcaaaagcagatattcatgatgtttatgcaacgtacgtgcatactgatttaaaacaaattggaaatgtccaaacagatcattcattttataatgaattatttgatgcagcaatgcgtacaaagctgaataatgttcatggaacatttgaagattgtgcaagggaaagactaggttatggtggcgatatggttgctttagcagcttctaatctttatacgtttgatttagaagcattttataaaaagattatcagagattttcgctatgaacaaacaacaaatggcggaatacctgaaaccgctccttatatgggcattcaatccaatggaactggtcaaggtgaaggaccattattatggcaattggtctatccatatttgacgtataagcattatcaatattatggtgatatttctttactagaggaagaatatccatatttaaataaacaattgaattatttattgagttatgatttagatgaaattgctgaacactgtttaggagatcatggcagtattttgattgctggtgagtttagaaaaccaacaccggataagttgttattaggttattgtacaatgttattattccttgaatacaatattgcaatgagacatattcttcataaagatacaacgttgtatcaacaaagatatgacgaaattaaagagacgacaattcaaaagtttaaaaatgaagatggctcatttggtgaaggaacacaaacaggttatgcttttgcgattcgtttaggcttagatgatgaaaagatattatgtcaaaagtttgttgaaaagattcaagcggatcaaggtattttcaatagtggaatttttggtatggctttaacatatgaaatattagctaaatatggatatcatgaaataattgaaaattggttattacaagaaagtgatattggctttaaagctatgttatcaaatggaaataaagctttagctgaattatttgtaggtgaacagctatctttgaatcatgctatgtttgcaagctatcaacaatggtattatcaaggtttagctggtatttgtattgaaaataatgctgttgcttttgataaaattaaattaaaaccatatttttctaaacaagtaaatcatgttgaatgtcatgtacagacaaaacaaggaatgattcaatccaattggcaaagaaagaataacgagattgaatggataatctctataccagaaaatatccaatatgagatatgtttagatcaggaatatcaaaaagaaatcattgatcagcaaatgattattcatacattaggatagcttggctatccttttgttattaaaaaggagaaacttatggaagttaaagatcaatatttaatgaaaaatggagaagtctttttctatttagcagatacatgttggagtgcttttacgaatattgaattagatgaatgggaaagctattgtcaattcagacaaaaacaagggtacaatgtgattcaaatcaatattttaagacaatgggatgccagtcatatatcaattcgtagagatccttttgaggtaacattattagatgatgggcattatatatatgattatcaaaatattcatgaagattattttgatcgtgctgaaaaaatgttagagattatgagaaaataccatttaacacctgctttggttttattgtgggctaattatgtaccagatacatggacgaatccaatgattacgaataatctttttaataaagcttatttaataaattatgttaaatatgttgtcaaacgttttcaaaaatatgaaccgatttattttgttagtggagatactgattttcctacacttcaagcaatagaatactatcagattgttttagatacattaaaaacatatgacaaagagtctttggtttctttccatataaaaggacgattggatgaaattccagaacaatttttaaaacgtattgacttcttctcttatcaatcaggtcataataaaaattaccaaaatacagcttttacgattcctcaaaaattacgcgaaaaaggcataaaaatgcctattatcaatacagaaccatgttatgaacaaattagctatagtcatagttgccatgaatttggacgttttagtcgcgaagatatacgaaaaatagcttggcaaagtatcctttcaggagcaaatgcgggaatcacgtatggtgcccatggaatttggagttggcatcataaaggagaaaattttggtgttcatactggtgaaggctttgatgttccttttgatgtgataactgctttaacatttcaaggggcatatgattatgcatttttaaaacagcttgttttaaaatatcaaatttatctaagtcatcctgttaatatagaactcatgcatacaccactaataagaatatctcaaaaagacaatgattattttatctatttaccttgcaatacagaattagatgtttcttgcttaaatcttaatttatcacaatatacaatcactgccattgatttagaaaaacgaacaagtgaaactttaaaacatcacaatcaagtgattgaaatgcattctggtcaaaaagatgctttatatattctttctttgaaaaggtaagacttgctatggaatgggaagatagcgtagaatagaagaaggaaggatgtgcatagtatgactttatatgatctttatttagataatgatgtagaaggatatattgtctttaaaacattatcaagaaaaaggattatggaaattatcaatcattattatgatgaaaagctcatcataacatcagaaagttttcaaaaaagaggagaatgtcttactttatcaatagatcgttatttttatgactatttagagctttactttcaaattgtcaaaaataaaaaggaaacaactattcataatgatttgtttcatctttcaatgacttctccattagaacaaatggtgcataaccaagtcccaacaattctatttggaacaacaaaactttttcaatcttttataatgatttcaaatataagacataatcagattgttttagatatccattttcaaaatggacagtcatattattatgtagaaaatcaagtttataaattaaaagaaaaaaatcaattttctaaattatataagaaatttgatttagataaagaaggatagaaatgataccacaatatatattagaaaaattagtatgttttagtgaagaagaaatcaataatcttaatggacaaaatgatattgatcgaagtatctttattaatcaaaaatcaaatacaattgattatcatcatttattagaagataatcaattgttttcagtcagaaaacatacacgtttttgccaatatccagcgcataaacataattatattgaattgatgtatgtttatggaggcagtatgacacatacaattgaatcaaaaaatatcacgattcatcaaggtgaattgttattgttgaatcaaaatattgaacatgcaattgattattgtgatgaaaatgatattatttttaattttattattcgtcctgaatttttatcatttttatctacgatgttagatgatgataatgatgtctcacgttttatttttgatactttatattcttatgataatgatggtgaatatttggtttttaaagttcaagataatgataaagtgaaagaatatattgaatcaatcattattcatttatatgagccacgtttacataatgatttagaattaaaattattggttggtttgttattaacagaattaatgaatcatccggaaagtatagaatcttacagtggagatagttatgaaaaagtgttaggaagtatgattttaaagtatattcatttaaattataaagagggttcattggctgaattatcagcgcttattcatcaacctaactataaaatatgtaaactaataaaaaaacagacacatcagacatttactcaattgttacaagaggaaaagttaaaagtggctacacatttgttagtgactaccaatatgtcaatgaatgatttgattatagaagttggttatgaaaatatttcttatttttatcgtatttttaaaaagaaatatcaaatgacaccacaagattatcgtagacaatttcaaagtggtgatattttatgattttttgttattgtgtggaagcaatattgatattatggattctcatagatctttatcgtatgaaaacatgtaaagatttagcaaaaatcaatatattattaatgattatatcgctgttggttttatcttatattttttggggtgatcaaaaaggcattgttgattggatagagcatcattatgatttttggggaatctatttgtttacacaacttattttcttaatgacgcattatattgctgatagaaaagtcaaaccatagcattttgctatggtttaaatatgaactttgagtatttcaataaattgaaactttttatcttcatatccaaaatgaagaattgaacaatttggaaaaccaccattttttctgatgatgttggcatcttcccaagctgataaaaagttgagacaagctcctgcatgagaaacagcaagaacagtatgatgatcttctttttccatgatttccgttaaagtttttaccattctatctctaacttcataactgtattctcctccaaacaagggaaagatattatcaaattgagtaatatcagcatttaaatcttcactctcaccttcaaagactgaaaaatatctttcttttaatccctttaaacgaatatagggtttatctgttattaattctaaagtatcacttgctctttcagccgttgaacaataataatggtcaaatgaaatatcttttaacaattcttttgctgattgggcttgttggattcccaattctgtcagtggagaatcacaccagccttgaatttttcttctcacattaaacaatgtttgtccatgtctcattaaatacaaatcttttttcatagtatcctccttggatactattttaacatttttaagaaaaaaatagattcattttcttatttttaaaataaaacactattcttttgtttatattctttaggtgaacaatgatagatttctttgaactttttataaaagaaagttaaattttgataaccactttttctagcaatattatcaatagaatcttgattgtttaatatcaatttagcagcatagtccattcgtaattggattattaattctttatatgattgatgaatgtattttttaagaagggttgtcaaataacaaggatttacaccaacatgtttggccgttgtttcaagtgaacaatttaaaaaattcttttccatataacttaaggcattgataataattgtattagattcagtaatagattcataattgacacttgtacttaaagaattaatcatctctaaaataattaagacaaacaaactattcataatttctctagcattcagtgaaggaaaataatattcataaagaaattcataaataaacatttgtagacgttcattattttcagtattaaaaatcatatagtttgatgaagcattttcttcattgatagtattaataaaaaaagaagtgatgagatttttgttgtttaattgagacaaaaagtgatttataagatattctttttttatcagaaaattaatcataatatcatcctcatctgtcatcccaatcgcatggggtgtttttgtatcaatgaaagtcatttgccctttgtgaataagatgcttttttccatcaatatattcttcacattgaccagagtacatataattgatttcaatataatcatggatatgattaggaacttcagcaaatctctcatttcttgttaacataattgaatcatttcttagtaattgagaaaaggtgaaatggtatatctcttgatttttttcatctaaagagattgtaagattattatattgatgcattgaaccttgtaaatgtctttcttcagaatcagtatgttgtcttaatatattatctagtttttcataattcatgatgctcacctcgctttatctattttatcatacaatctaaagtttggttagtttttatttcaaataacgatatatttatttattaaataacatgctaaaatacaaataaggatatgataactcttacaaggaggaataaaatgttacgtttagatattttagaaaaacttgtttatttcactgaagaagaaattcatcatttaaatggtgaacatgttgttgataaaagtatatatcttaatgaagaaagtcaaattattgattgtcataagattttagatgatacacaacaattagcagttagaaaacatgcacgttttatggcctatccaaaacataagcacaattatattgaattgatgtatgtttatggtggttctatgacgcatattattgatgatcaaaggattacgattcatcaaggtgaactattgttattgaatcaaaatgttgaacattctatagaatattgtgatgaaaatgatattatttttaattttattatgaaagcggagtttttggaatttctatcttatatgattgaaaaagaaaatgatgtctcacattttatttttgatgctttatattcttatgataataatagcgaatatcttatatttaaagttcgagataatcaaatcattagagattatatagagtctatcattactcaaatatatgagcctgaattaaatagtcatttagaactaaagctattagttggcttattattggctgaattaatgaatcatccagaatgtattgaaacctatcaatctaatagttacgaaaaattattaagtagtacaatcttaaaatatatagctacttcttatcaagaaggctcattgtcaacattatctaaacaacttcatcaaccagattataagatatgtaaaattattaaaagacaaactggtcaaacttttaaacaattgattcaagaagaaagattaaaagcaacttgtcaacttttaaaaacaacacaaatggcagtaactgatattatggtagaggtcggttatgaaaatgttacttatttttataaaatatttaaagataaatatcatatgacaccacatgattatcgtcaacaatttatttaggtgcaaaaaaggataataggcaaaacaaatatagatatattttgtaatgtataactttgttaggatataggtgtcaataaaagagggaggaaaataaattatggacaaaatagaaaaggtattagcaccatttgctaatgcattaaacaacaacaaaattattcaaacaatttcaaaagcactaatgtcattaatgccagctcttatgattggagcgattggatcattattacaacaaattccaattccagcatatcaaaactttattcaatcaaccggaatttatgcatttactcaagttttagtgaatgttacaacaaacatgttagctttatatgctgcttttgcaattagctatgtatttgttaaaaatgaaggacatgatggttttacagggggaattttatcattaattgcctttatgattgtgacaccaatggaaacagttggtgaaggatgggctgctgtgacaaatttaccacttagttggttaggtgctaaaggtttatttactgctatgtttgttgcattactaacaggttatatttacagtttcttaatgcgtaagaatataactatcaaaatgccagatagtgtaccaccatttgtttctaaatcattctctggaattataccaggagctgctattgcattgatttttggaatcatttcaatcttaattcaaatgacaccatttggtgatgttcatcaggctatttatggattgattggtgcaccattatcatctataggaggttctatttgggcggctttacttatttatgtgttaagtggtttttgttggttctttggaattcatggaattgctgttatgagtgcagttatgccgatttggatggcagctgatatggcgaatgtatctgcaatttcagctggtggagctgctagtaatattgtgacttacaattgggttaatgcaattggaaatattggtggagctggatgtactttaggcttaattctgctatgtgcatttgctgctaaaagtaaacgttatagagaaatgggaaaattagctattgttccatcttgctttggaatcaatgagcctgttgtctttggattaccttgtatgttaaacgcaacattgatgataccatttgtctttttgccagtcattttaattggaatttcatatgttttaacaattacaggaattttaccaataggtaatgggattgctgcaggggcttgtataccagtcttttcaggactattaattggtggatggcgcgttgctttatggaatattattgaaattctgattactgttcttgcttatttaccattctttaaaatcttagataaacaagcttacttagaagaaaatccatctacagaaaattaggaaattgtcgtcatgacaattccttttatattctaacaaggagataaactatgaaacgattaaaagaaaatttagaaaacaaaaataatcattatttgtatcctttcttttggcaacatggagaatcattagatgtaataaaagaatatatggatcaaatgtatacacaagggatttatcatatatgtattgaatcaagaccacatccagaatttttagctgagggatggtgggaaacaatggattgtattattcatgaagctaaaaagaggaatatgaaaatatggatattagatgatgctcgatttccaactggttatgcgaatggaaaagttcctaaacatcttaaaaaaaggtatttgaattatcgaagatttgatgttgtaggaacaaacgaacaagtagaaattaatttagattattttgttgatatgcgtgagttgatgagggataaacgccatcaggaagattgcttttttaaagcaattttggttgaaaatgatgtgactgataaaaagagttttaaagaagaaacactacaagatgtcagtcattgttatgataatcacacattacatctttctttagaaaataaacattatagtgtttttgttttgtatgaaacaatttgtggtgaagaaacaacccaagattatttagatcctatgcgaaaagaagcaactcaagttttaattgacgaagtatatgaaaaacattttcagcattatcaagatgaatttggtaaaacaattgttggttttttttcagatgaaccacgctttggaaatataaaagggcctcaagcatcaattggtagaaaagaaatgccccttccctggaatcatgaagtttatgatattttaaagaaaactaaagattttacagatgaacaacttgtctttttatttcttggacaaagtgaaaaagcttcaatgataagatttcaatatatggatattataacacgtttgtatagtgagaatttttcacaatatatagggaaatggtgtcaaagtagaggtgttgattatattggacatgtcattgaagataataatgctcatgcaagattgggctatggggttggacattattttagaggaattgctggtcaaacaatagctggaattgatattattggtggacaagttgtgcctggaatggattattatcatgatgcatttagtacaggaggtagtgatggagagttttatcattatgctttagtcaaaatgggagcatcttcagctaaattagatccgcaaaaaaatggacgattgatgtgtgaagcttttggagcatatggctgggttgaaggactcaaaatgatgaaatggataactgatcatatgttaagtcatggggtaaatgtaatcgttcctcatgcctttaatccagctcctttcccagattgggattgtccacctcacttttatgcacatggtcaaaacccacaatacccatattttcataaatggtcacactatgctgatagactttgtcatttattgagtggtggatatcatgaagcaaaaataggtgttttgtatcatgcatttggggaatggtctggagaatatatgttaatgcaaaaagttttaaaagagcttcaacaacatcagattgcttgtgatattatcagtgaagattatttgttggatgctcaaatcaacaatcaaagttatattatcaataattatgagtatgaagttttaataataccttatgcacagagattacctcaacatttactaaagaaaattgaagaactatcacaacatatccaagttgtatttatgaatgattatccagtcaatatgctatataaaggattgtgtcaagttcttgaattatcttctttatctcaacagtttaagcaatatcaagatgtaaaatgtgaaagtaatcaaccttatttagtaacttatcattatattcatgatgatggagaagttatgatgttgaataatgaagatatttgccattgtatagatacaaatattacattagaaaataaaaattggatgatttatgatgcctatagcaaccagacatatcaattagaggcaaatcaattatttgataaaaagaaatttcatttacatttagaaccttatcaatcaattattttggttacaggaaaatcaaatcaaaaactttattgtaaaggacaattattgcaaacaataaaagttgctgatgttgcattaaaatcatatcaggaacaaattttttcaagctctaaaaagatgtttattgaagatgatttaacaaaattatatccacatttttcaggacaaattcaatatcattttgagttaaatattgaacaaaaaaatgttcttttagaattagaagaagcgtatgaaattgttcaaatcattgtaaatggtaaagatggaggaacttatattgcaccaccatatatttttgatttatcacaaacagttgttgaaggaaaaaatcaaattgaaatcattactacaaataatttgtcaagaaatcaaagagatgctttttcaatatatatacctatagagccattaggaattagaaaaaatattaaaatttatagtaaggaggaaaaagaaaatgagttttccaaataattttttatggggtggtgcaatagcagcaaaccaatgtgagggtgcctataatgaaggcggtagaggtttggcaaatgtggatgttattccacatggtccacaacgttttgatgttgcaatgggattaagagaaatgttggaatttgaagatgggtataattatccagctaaagaggggatagatttttatcatcgttataaagaagatattgcattatttgctcaaatgggctttaaaactttgagattatctatcgcttggacaagaatttttccacatggagatgaagaagaacctaatgaagaaggactcaaattttatgaaaatgtatttaaagaatgtcataagtatgggattgaaccattagttactattactcattttgatatgcctatatacttaattaaaaagtatggtggatggaagaacagaatacttattgatttttataaaagattagtgacagtattatttacaagatataaaggactagtcaaatattggttaacctttaatgaaattaatgtcattttgtttatgccatttatgggagctggccttgtttttaaggatggtgaagatcaaaagcaggccaaatatcaagctgttcataatgaattagttgcaagtagttgggcaactcaaattgctcatgaaatagatccatctatgaaaataggatgtatgttagctgctggatcacattatccatatagttgtcgacctgaagatgtttttgcagcaatggaaaaagatcgagaaagttatatgtttattgatgttcaagcaagaggatattatccacgatatgctttaaagatgtttgaaagagaaggaattcatatccaaataactaaagaagatgaaaatattcttaaagaaaatacagttgattttatatccttgagttactattcttcgcgttgtatttctacttctgaaaataataaagatggtttagggaatatgtttgctggtacaaaaaatccttatcttaaagaaagtcaatggggatgggcgattgatccattaggtttaagaataactttgaacgctttgtatgatcgttatcaaaaaccattatttattgttgaaaatggattaggagctaaagatgaaattgaagaagatggtacaattcaagatgattatcgtattgattatttgagagaacatattaaggctatggaacaggcaatcaatgaagatggagtagatttattaggatatacagcttggggatgtattgatcttgtatcagcttcaacaggtgaaatgagtaaacgttatggatttatttatgtagataaagatgatcaaggaaatggaacactagaaagaagaaaaaagaaatcatttgattggtacaaaaaagttattgaaagtaatggtaatgatttgagttaagtcttttaaatctttagatatgataggaaaagctgtataataattgtaaagaagctgataaaaatgcagaagttattttggtggaatttaaatgaaggtgaaaaatatcagcgattaaaacatatggtttggttatatgttactacaagcattatattattttataaatgcgattgctttatgtctatcaatgcttcttgttgtttcttatatcatagagttaaaaagattaaaaggcaaaataggacaataggaaaaacaacctaggacattaaaatctaggttgtttttttgtatgattacatcatcaaaagtgaggtgggaagatgaaatattttttagccattgatattggagcatcaagtgggagacatattctttgctttattgaagaaggaaaaatgaagttggaagaagtttatcgttttgaaaacaatgttcaaatgaaaaatcaacattattattggaatattgattatttgtttggtgaagttgttgctggaataaaggcatgtgttaaatgtggaaaagttccaaccacattaggtattgatacttgggctgtagattatgctttattagacaataggggacaaagaattgatgagatttatgcttatcgagataatcgtgttgataagctgattcatgaaaaagtgaatcaaaaagtctttgaagatatttatcaaaaaacaggtattcagtttcaaaagtttaacacactttatcagttagcaagtgatgatgacataagaaaaacaagagcagttgatttcttgatggtaccagattatctcaattatttattaactggaaaaaaggtcaatgaatataccaatatgtcaacaacacaacttttagatattgagactcatcaattatcaaaggaactaatagatttttgtgaagttaatgaaaagatttttcaaaagatggttatgccaggaacatctttaggaagtttatcagaagatatgcaaaaagtgattggaacgaatatagaagttgttgttccagcaactcatgatacaggaagtgcttatatggcagctattgaagataacagtgtgattttaagttcagggacatggtctttattaggaattgaaacaaaaacaccttatgttagtgaaaaagcaagagttgctaattttacaaatgaaggtggatatgattatcgttatcgttttttaaaaaatattatgggactatggattattcaagaggtttctcgtaatttagctcatcaatatagttttgcaaaattagttgaagaagccagacgtgattcgtttgatggtatctttgatgtgaatgatgataggtttttaaaaccagagagtatgattttagaaatcaaaagttattttgaagaaagacatcaaaaggctcctcaaagtgttggtgagattgcttattgtgtttatcattcattagcacattgttataaagaagctattgaagaattagaagatattacaggaaaacattttgatacgattaatattattggtggtggttgccaaaatgaattgttgaatgaaatgattgctatggtatgtaagcgtaaagttgtggctggtccaattgaagccactgctttaggaaatcttttagctcaattgattcaacaaggagttgtgaatgatttgagtgaaggaaggcaattgattaaagcttcatttgaagtgaaagaatataaaggagaacaattatgagtcaaagatttttagaagcaaaagaaatttatcaaaacatgggtattgatgtagaacaagctatcagtcaattacaaaacttccctgtttctatgcattgttggcaaggcgatgatgttgttggatttgatggagcaggagctttgtcaggagggattcaaacaactggaaattatccaggtaaagcccgtaatcctaaagaattaatggatgatattgatatggctttaaaactgattcctgggaaaaaacggattaatcttcatgcatcgtatgctatttttgaagatggtgaaaaggttgaccgtgatgctattgaacctaagcattttcaaaaatgggtagagtttgcaaaagaaaggggattaggtttagatttcaatccaaccattttttctcatcctaaagctgaaggattaacgctttcttcagccgataaggatattagagatttttggattagacattgtcaagcatgtattcgtattagtgaatattttgcaagtgaacttggaacaccttgcctgatgaatatctggattcctgatggattaaaagatattccaggtgatcgtttgacaccaagaaaaagatttaaagaatcattagatgaaattttatctatggattatgataaagaaaaagttcttgtttgtttagaatcaaaggtttttggaataggaatggaatcttatacagttggctcaagtgaatttactattaattatgccaaaacaagggacattctgccattaatggataatggacactatcatccaacagaagttgtttctgataaattatcagctatgttgttgttccatgataaagttgctttacatgtgacaagaccagtacgttgggatagtgatcatgttgtattatttgatgatgaaacaaaagagattgctaaggaaattgtcagaaatgatgctatggtgagagtcttattaggattagatttctttgatgcaagcattaatcgtattgcagcttgggttgttggtatgcgtaatatgcaaaaagcaatgttgtttgccttactgcaaccttatgatgaattaagaacattacaagatgctggtgattttacaaaaatcatgatgattcaagaagaattgaaaacttatccattctcagatatttgggatgaatattgtcaaagaaatcaagtgccagttagagaaaaatggtatcaagatgttaaaaaatatgaaacagatgttttagcaaagaggggttaatcatgaatatattagatttagaatttattaaaggatttatcagaatgtgcagtgatggttttgctcaaggatggcatgaacgtaatggaggaaaccttacttatcgtatgaaagatgaagaagtcaaacaagtcgcttgttattttaccaatgaaagagaatgggatggaattggaactgaagttcctcacttggctggagaatatttcttaacgacaggttcagggaaattctttagaaatgttgaacttgcacctcaagaaaatattggtattgttgaaattgatgaaactggaacaaaatatcgtgttgtttggggactgattaatggggctgtgccaactagtgaattgccatctcatttgatgaatcatgaagtcaaaaaactagctagcaatggtaaacatcgtgtgatttatcactgtcatgcaacaaatgtcattgccttaacatttgttttaccattaaaagatgaaatctttactagagaactctgggaaatggcaacagaatgtccagttgtttttcctagtggtgttggagttgtttcttggatggtaccaggtggtaaggatatagctgtagcgacaagtgaattaatgaaaaaatatgatgttgctatttgggcacatcatggaatcttctgctcaggtgaaaactttgatatcacatttggactagcacatactgtagaaaaatcagcagagattttagtgaagatgttatcaatgtcaccaacaaagttacaaacaattcagcctgatgaatttcgttcattagcaaaggcttttcaagtgacattaccagaagaatttttatatcaaaaataaaaaagtgtttattcttttcctcccaaaaaagaaaatacttatcatatatgaaaaagatatctccattgaaagatatctttttatgttcctaatacttttcaataactttataaaatttctcataagttaagttatgggataatatctctttgataactctcatcatccttcatctattctaagtcactctttagataatattttaaaacgtactgaaataaatgtttttcgttttcttatcatcgttttagctcatattgataaagtctatgcaatatatttttgtatactttcataaaattgctcataagataaatcttgaaataagagttcttttatcatttggcattggatttcattgcaatcatcaatccaatttaaatcatttttaggatatttaaaagcaacgcaatcttttaaagcttttttttcaccttctttttctcgttctttcttttcttcttcatcacatgctaaggcaatttctctttccatcgcacgttttagtgattcattatccatttggagttttaacattcttctttccatcatttgaactatcttcctttctttgtattttttcactttttcatttataccattttgtaaaatataaatcatcatttcaaaatcacttaattgaccaacacctttttcctttgcgatgacatcaatatagggtagatagatataatagcgaatcaataaaatatcttcgtcatggtcagttttgatttctctttgccctaaaggtgtccttgcttcaaaggagttaatcaacctaggctgttgttcattaatatcattaatgagaataatctgcacgttatgttttaggtttgcataatgttcaccaacattcaaactttggtaaatgagagtggccccatagaagccaaaacgtttggcctgtgtttttgaaaaatgagaccgctgcatctcgatatcaatctgattgccttgttgatcctgaatcaaaatatcataacgtattgttttgtcatttgcatccagtttaagaatttcaggattggtaatgatataacgctttaaagaaaaatgtgttgtttgttcaacaagcagttttaaaagatatgtactatcactatcacattgattagtgaagatgtacttaaaacaaaaatctaattttaaatcaatcatataaaatacctcctactactatatactgattttaaatcgatttttctttttttattggaaacttttttaaatattttacataatgggtcctccttagctttaattttatcataaaatatgctaaaagcaaataaatacaaaaaagagagattgagattattgaattattatcaataaaatcaattcctctatttatacttcaaaatacaaaagaatggttagaaatttattttctatttaataagcgaatccctatgataatttgttacatctgttcccattttttcatacaattctttaacagttaattcttggttctttaatgcgattaattcattgttggttgcaccaataaattccacaaattcaacatatccatttggtgttgaaataggcgctacatctgtatcaggaattgttataaaaccagtaatatttgataacatcttgatatcaattccttgtgtttgaccagtataaatatattcatatggtctaaagatttctccattgacaaaagttaatttagcaattgtttgtaaaatattacaaatccctttaagttctgcttcttcatcttcataatgatcttttttaagtttgaaagtaaactccataccataaccacttatttctttattttcggattctttttcataaagttctgataaaccataagttacaaaatgccaataatcttcactttcatagatactgattccttgtaatggcgaatctccgcctaaacgccaactgattaaagttccataatgtttaggatccttttgagtaggataaactttttcaaaagcttctgtaattgcatcccaaccattagcccgtatttcttgccttgttatttcttgtttactagattgtctatctttttttaatttgtcaaataatcccatgttctttctcccttcattattaaaaattatatcttgatttaaaatcagatacaataaaaatagatatatttcaaaatgttgaattttgtcgtattaaaaaatattttttagatattttcattttttggaaaagttggaaatagaaaatgaaaagatgtaatataattaagaggtgatgttgagatgtatattattgataaattacaaaaattatatgaaataggaggaatttcacaaatagatggagaattagcatattatttattaactcatttaaaagaaatgaaatctatgacattacaaaaatgtattcaagatacaggtatttctaaagcctcaattcatcgcttttacagtaaagcaaaatttcctagctttaaagatttaacaaaagaaatttatcgagaatatcatctcttagaaaataaaaactttgaaatgttgcctacaaatcttccttttgaaaatactttagatgtttctcatattcaatctttagcaaagcacatgatcaatgcatctaagattttattttatggaaatcaagaagaaatgaatatcttatcaaatacttttgatgctttaagaaaacataataaaatgttcaaatcattgatgaattggaattattctataatgatggatgaaatagaaagtttaaaagaaaacgatttacttgtgattatcgatacttcaatgaaaatacatatgtttaatgaagctactcttaatcaggcagatatgattaaattaagccatttaaaagactttccttttcataaatattatattggggatggtatgaataatgaatatggttttgaaactatacaattattattgactcataagcaaatgaaaaatattgatttagctttgtttgatattcaacttagttatgacattgatcaaggaggaaagttatgaataccgtattatcattaattattatgattagtcaaaatacaattagaaaagataatatgaattttattgctagttatattattgatcatttgtatgaaatagatgcaatgagtattaagacattagctgaaaattgttatacatcaacaacttcaattattaaattctgtcaattaattggttttgatacttatgctgaatttaaaaagtatctctattctagtttagaaacaagaaaagaacagttgactaagaaatgtcaaaatcttcagattgaggatttatttaataaaattgaactcttttcacaagattctttagataaacaatatttatatcaaagtgttcaaaaaattgttaacatgattattcaaaaacgcagtattcatttttatggtgctgtttttcctctagcattagtggaatcttttagtgaggatatggcaattatgaaagtccctgttcatgtccatcaaactccttttgatcaaattgatttacaaagcaatgaagcagtgaatatcattgttactttgacaggtcgttttattgagttaaataaagaaggttttcaacaattatgtcaacttcatcaagatatcgtattaatttcacaagaagtatctgatttaaaggaaattgctttgcagttaactttacctcatacaatgaatagtgattatgatgatattctttacatattgttgttggatttaataaaattaagttattatcagttttatcacgaacatctcgattgagatgttttttcatttgaactaaaaaaaggtgatttatcaccttttagaaaaatataatgtatttttaatagttatatctattttttatttctgattgatttatcattgttaaagaaattagcatatttataattgtaccaaattttagaataattaaattttttaccattagaaagaaaaacattatcatcaataattaatccaaaagcgcctggttctaattgcaatagcactaaatcctcttgggataaaggtttagttgaaatatatttttcagagaaaccaatatttaattttaaatcatctgtaataaaagagaaaatagattttttagctatgtcctcacttaagtacggaatgatattcttattgtagtaagtatattctaccgcaaaaggtatatcatcaatatacattaatcttttaatgtaataaatgggagtgttctcctcgcattccatgagttttgctaattcttcatcacaattgattaattgaaaatctaatattgttctttcaagtttttgaccaggatgatcaacatagaatccagaagtgttgtttaattttattgttcctttattaggctttctaatataaaatccacttccatgaatagcaaataatataccatcattgatcaataaatttatagcacttgtaatagtatttttactagcattatattctaacatgagttcattacccgttggtaatttgttattttctttaaactcaccactattaattcttctttttaaatcatcagcaattttatcatattttttcatgcattcaccttcattcattatcatcttaacattgaatgatataaaagtaaagtgtatgaggacaatttaataataatgatacaaaataagaaaacgctaacaattttattgacaagataatatattttgtgtattctattagtaggtgataaataaattgttaccaaacaatattattgaaaggggataatatgttgagatggatgaaaaaaataagaaaaggatttttataacagtcttttgtctgagtgtagctattatagctatggtgtttgttttttttaacaaaaataaagaagatataaaatatataatgacagttggcaagatggatgttgctagtgaagaagttcatatgattgtcgatgatataaagttaaaaaataaaaataatctgataagtacttataaaatttcccatgccaagtttgattggaataaaaattatggagataaaaaagcttatcaatatctattagatgatttgattgagcaagtgacaaaaacaaaagttattcaacaacttgctgttgaggcaaaaataatagatgactttgattataagatgtttttgaaaatgttagaaaatgaaaatgaaatgagacaagaaaaagcttcaaaaggtgaaatcttttatggtttagaacaatttaatcaaaaacaatattatcaatatttgaataataatttattgttgcagttgaatacatacttgattgatcatcaaaaaataaagctcagtgatgaagaagtgaagcaaacatataaagacaataaagaatatttcaataatctgaaatttgatgaagtcaaagataaagcaaaaaatctatgttatgaaaataagatagagatgtatatagaagataaaatggaaggggtgaaagtggattataatcaagaagaattagaaaagtatgttatgcaatgtttgaataatgaatgaaggagaagaaacaatgaagtggaaaaagggagttttgaaagtatggacatgtgttttgacaatctcacttttgtctaatcctgtctatgctcagggaaatcgtcaggcaataaaaactgctgtaggtcatacgtattacgtagatagtgtcaatggaagtgataaaaattctggaatgagtgaaaatgaggcatttaaaacactttctaaaattaatcacattgaattgagtgcaggagatattgtttatttaaaaaatggtagtgaatttaacgaacaattgaaacctaaagggaaaggaacaccagctaatcccataactattactaattatggtaatgaaaaaaatggaatgccagttattaatggtggtggtcaaatttatgaaggtgctgtgaataaaacaagttcagcagtattaattgaaaacatggaatatgtcaatgttagccatttagaagtgactaatgatgatgtttttaatatgacagattcagctaatgataaaaataacatgaaaggaaataaccaaagaagaatcggtattcatattacaattaatgaagatgcaccaacctttacagctaatcaaagagcttggaaaggaataactgttgaaaattgttatgtacatgatgttgatggagatgaacaacgtagtgcaaacaaagtgaatggtggaattggagtagaagttttctttagaaatgctaataaggtttatccttattttgatggagtaacaattgcatcaaatacaattgaaaaagttgatagaacaggaattaaaggaattcgtttaactgaattgtctttagcagacaatgatggtggtgattctgtacgttatcaagcagtaagagcagaagcatcaaaaaatcaagcaggaagaaattttgttgtgagaaataatgatttaaaaaatattggtggtgacggtattttaattgattcaacaatcaaaactgttgtagaaagaaatacattgtttgatcatacaaaacgttctacattagcgaatgctgggatttggtgttggaatactcaagatgttttatttcaatataatgaatcttatggaggaccaacatacaatcaagatggctgttcatatgattgtgattacaacagtgcaggaactatttttcaatataattatagtcatgatacgccaatgggatttatgttattaatgggtggaaatgaaatggatattgtacgttacaatatttcacaaaatgatggtgttgcatggcgtcatttttctggtgatagtacaacaaaaagttatattcataacaatgtcttttactatgatggagccaaatggaaatggtcagaaagtgataatttaaaaaataattatgaatttattaataatattttttataacacaaatactacaacaccaacaacttggggaaaatcaatggattggtctaaggcagtttttaaaaccaatgctgtttatgaagctagtcaaaaaaatggtatcaatgaaatacctgatgttatccatgttgatccaaaatttaaaaatgctggtggaggtgaaacaaagaattggaatactttgcaaggatatcaattaaaagaagattcaccattgattaataaaggttcatacgtttatttggatttatcaggtgcaagattgttagataatcgtgattattatcgagcaactcaagatttctttggtcatcctttatatgttggagctcctgatattggggttcatgaagtgaattctaaagtttcttctgatttaaaattagaagaaaatggaacttatcgattaataacaggagatggttgccaatatttagattattcaaatcaaaaagtaacattaaacgaaaataagactgatgaacaagaatatgttttcattaaatcaacaaatggttataaattaaaattattaaattcaggactagatgtcttatatttaagtgttgaaaatggtcaattaaaactgagtgaaaaggcaacaatttggcaaattgaagatttaaaaaatggacttgtgaaaatcaaaaatggaaatcaagccctaagctatgatggtaaaaatgtttttatcagcaatgataagcaacaagattggtatttagaacttgaagaaaattcaaaatcatttaactgtggtggaagtagtgttgaaggatattctttagatcaacagtggaatgaagaaaaacatatttctggaagatatggggatgttacatctattggacaaggaaacagggatgttttttcaactgccattgttggtcagaagtttggttataaatttcctgttacaaaaggaagttataatgttaaattaagttttaatgaaattgaagatgttaaaaatagaacatttgatattttggttaatggagaaatttataaagaacaattcaaaataaaacaaaaaaatatagttgaagaaattggaaacgtttatccaaaaaatggtgtcattgatattcaattagtagctgcttacaatgatgatggggtaaagacaaatggcttattgaatgggatttctttacaaaaagctatgagtgctcatactacacttaatatgaactgtggttcaagtgcagttgatggattaagtagtgatgcacctttccctacaatgggaagtggatattatggagacagttcttccattgattttggaaatgctggaaggcctacttatgacggtggaatgcctacagctatgcaaacagcaagagaaggaagtgaatttggttataaatttaaacttcagccaggtaactatcgattaaaatgtttatttaatgatgggaatgcgaaagctaaagaaggagaacgtgtttttgatatttatgtgaatggtcaattattagtttctcattttgatattgttaaagaagcgaaaggtaatcgaaaaggggttgatttaacacgttttgttaaatctgaaaatggtattcttgatgttaaatttgttggaaaaaatgggacaaaagctttggttaatgtgattatggttgataatttaaccaaagaagaaaaccgtgaaaatattttgttaaataagaaagctacatgtagttctaaagaaggaagtttagatgctaattatgttgttgatggtagtcaaacaacaagatggggaagtgattttaaagataatcaatggattcaagtagatatggggcaatcttatttattagatacagtttctattgattggacttatggagcatatgctaaaaagtatcgtgttgaaatatctgaagatggtcaaaaatggacatctgttcaaaatgtaactgatgcacaaccaggattaaactttatttcatttgaaccaactgaaggtagatatttacgtatttttggtgaaacaagaaatgatgtttggggtatgtctattactgaattaggggcatatggaacaaagattctaggtacaccatgtgttgaaagtcaagttgatagtaacgagaatttatatactacaacattagggattaaaaatatctacaaacgatatacaacgatgactgtgacattggattataatgtgaaagaattagagtatattggtcgtgaaaaatatttgaatccaaatcttaaatttattgataaaaatattgaagatggaaaaataaaatataattttgaactaatgagacagaatgcttttgatgatgtttctgatttcatgaaatttgattttaaagccaaaggtgtcagaagtccaatcactgttcatacagtattaagtgatgcggcggcacatttaacagcattacctgaaataaaagttttccttccaaatgttattcatcattcagaattagaaactttattaaaacaagcaaaagaggttatggattgtgctgaagaaggaagattgccaggacaatatcgaaaagaagatatagcttcatttaatgaggtgattcaagaagttcaaaagattttagatcaaaatttagataaagaatatgaaaaagcatatacaaaattagaaagtgccattagtgattttaaaaattcagtcttaaaatatcaatataatcattactataaaaattatagtgtagataaagatattgattttgagtttaataatgcaagtgccaatctaaaagatgataagttacatattcaattaaatggtgctaattctacagcaacagatttgttagctccaaaactaaattcaggaacatttattgttaaatttgatattgatagtttaaaagatcaaattcgctttgatttaaaaaatactggaaaatcaagcatacaagttggttatgaaaatggtcgctggttctggggaggagcaaataatggggcttggggatatttccctaatatagaaaatgatttattgtttactgataaaacaaatgaagtttctatttcatttgaaaagcaagacaatggtgaaacggttcttactttaattgtgaatggttataaggttgggtcagttaaaaatacatttagcaatgaagcaggaaattatcgtttatggacacgctatacacaaaagaatttatatattcatgaagtaacatatacaaatgcacctatttatcatattgatgttgttggtacagataatggagcgataagtgagaatgggaaagtaaaagtgtttggtgaaacagataaaacattcatctttacaccaaatgatggttatgaagttgataaggtttatgtagatggaaaagaagttcattcatatgataaatatacatttcaatatattgaatctgaccatactttaaaagttacttttagaaaagttgcaaataaaaatgaattaaaagatttttatgatgattgtttagatttattgaaggataattatacaagtggcagttggaatcagttcatgaatgctttagacaagacgaaagatatcatatcggcaaatagagttacacaaaaggaagttgatgagtctttagaaacattaaaagatgctaaaaatagtttagtattgaaagaagcagattatcataaggttgatgaatggttagctaaagttcctcaagatttaagtcaatatactcaagaaagtgtagaggtattgaatattgcattggctaaggttgaaagaggattaaaaataactgaacaagagaaagttgatttcatggcagaagcaatcgaaaatgctattaaacaattagaagttcgtaaagaagataaacctgatattgattttaaaccagatgttccaattgaaccatcaatacctgatcatcaaggtgaaaatggagatacaaataacccggataatagtaatacgactgaaatagagacaaataatcaaaaagaggatacaacaaatactggagatacaacacttgtcacaacatttgttggattaggattgatgtccttagctggattattatttatgagaagaaaagaagattaatatgaatgaaaaaaggctgttaaaaaaagaatttagcagtcttttgttttgatatgaaaaagatttaataaatgataaaataagtgataggaggtaaatgaaatggaaccaagaaaattattagatattttagatattggggaaaggttaaaagatgcaacaagacattgttatacatcacaaggaaggcatgaaagtgtagcggagcatagttggcgttgtgcattaatggcttattttcttaaagatgaatttcctcaagcagatatgaataaagtcataacgatgtgtattattcatgatttaggtgaatcttttactggagacattccaacgtttgataaaacgcaggaggatgaaaaaagagaagattatttattaaaagagtggcttaaattattaccacaagattattctttggaaatgttggcattgtttgatgaaatggcaaaacgtgaaacgattgaagcaaaactttttaaagcgatagatagtttagaagctttaatacaacataatgaatctgatttaaaaacttggagtgaaaatgagtatgaattaaataaagtctatgctgatgataaagttgcgttttctaaatatttgactgaattgagagaagaagttagaaaagatacaattgaaaaattaaaaaatgtaacaccataatgatatgatgttacattttttcttattctacagttactgattttgcaaggttacgaggtttatcaacatcgcatcctttgatacatgctgtataataggcaatgagttgtaatggaatagcaaccaaaatagcttgtaaagtaggaacaacatcaggtaaataataagtgttttcaacattcttaacttcttcaccatgagttgtaagtaaaataactcttgctcctctagccattgtttcttgaatattactgattgtttttgccgcaatatgaggttgtgtagccactgcaatcacaactgaaccatcttcaattaaggcaattggtccatgttttaattctcctgccacataagcatcagcatggacataggaaacttctttaagttttaaagccccttctaaaacacttgcataatccaagcttctaccaatgaaataagcatcatgtaaattttctaacattttcgcataattttcaaaaatactatgatcctttaaaatattttcaacatactgtggaattgtatttaactgttggatcaattcgtgatcaatttcttttcctaattcttgagcgatataataagcaagtaaaattaataagataagttgagttgtataggctttggttgaagccacagcaatttcaggaccagcacatgtatataaaacataattggcatcacgagaaatagtacttcctaagacatttgcaatagcaattgttgtggctcctttttctttagctaaacgtagtgctgccagtgtatcagcggtttctccagattgtgaaacaaagatagctaaagtttgttcatcaacaagtggatcgttgtatctaaattcgcttgccactgttgcaatcacaggaagtttggttgctctttctaaaacttgtgaaccacaaagtgaagcatgatatgctgttccacaagcaacaaaatatactttattaaattgatgaaagtcaatatcattaagttcatcaagaacaatcttttgattaacaattctgcctcttaatgtttcagcaatcacgtgtggttgttcatagatttcttttaacataaatgtatcataaccatcttttttcgctgcttctaagtcataaggaacattgacaagttcttttataataggttctccttcatgagtaaagaagtcaatatgatcttcttgtaaaattgccatttcataatcagctaagaaataaacatcttttgtatattccaataaagctggaatatcacttgctgcaacataagctccatcagcttttccaatgattaaaggactatcttttttagcaacaatgactttgttaggttctaaagtagaaacaatgcataatgcataacttccttcaatccttttgagaactttttttactgcttcaaataagtctccatcataataatcatctaaaagatgaacaacaacttcactatctgtttcagattgaaaatgataacctttttgaataagttcctcttttaattcacgataattttcaataatgccattatgcactaaagaaattgtttcatcatcattcgtatgaggatgagaattcaagttagatggaatcccatgagtagcccatcttgtatgaccaatacctacatgtccttccattttaaaatcttgtaatttttcttcaagattttttaatctccctttacatttgacagtttttaaaccatctttttcaagtgttgttacacctgcactatcataccctcgatattcaagtttagataaaccttgcattaaaaagggtaaagcaaaaccattaccgcaataagctgtaattccacacataaaaacatacctccattaaattatttattattgaatgaagttatgcctgatgatatttgtttaatgattactcattatttttgctcatcgtttaggtagcatcatacctccagatcatccgccgaatctttcgataaatctggtcctcgtcaactctaatagagtcctggcgcttcttttttaattccttcatcaataacgtgtttcattatacatgaaatgaatatcaatagttttcaaaatttaaaaatattcaacactttattttatgcaacaaagaaaatgatgtgataaggatagaaaatagctttatttaaaaaagaaattttaaaaaatatttttgtaaattatgttgataaattcaatgaaatttctattttagataataaatttataaaaaatgttaaaaaaagttgctttaaaaaaaagaaaaatgagaaaaaagtgggtatatatataataggagggttattatgagtgtacaaagtaatttaatggaaatgaatgaatcattaaagaagttagaacagtctggtatctatgatgtagagaaatatagttatgcattattacatcagaccaatcaattagagtatttttattgtcatcttgtaaaagatggagattgtgatgatacttattatcacgtacataaacgtccacatgtgcatgagttagcttatttcaatattggacgtggatttcccaaagaattgatggatggccattggtgctatgttttaaaggatatgggatataaaatgcttgtgatcccttgtacttcaataaaaaaagactcaacaccagccaatccgcttttcgaaaaggatattaaaataaaaactgatacacatataacgcagtgtcgaattcaattaagtgatattcgatcggtagatattcaaagattagatttaagaaaatcattttatgaagttttaacaccaaaagaagaaattatagagtttgttgagaaaaatttatttgatatgtcatctgactaattgaatttgtgtatcagatagagtcttaatcaatagagaatcagagcaatctggttcttttttgatatgaaaaggaggaaattatgtattggagtgggtttacttagaaggatttaagttatacaaaaaaataaatgtgaggagaaagagtatgaaaaaagtagaaaagattttacgagttgtgctttgttttttgatgttattatcaacagtatcattaaatgtaacaaatgttaatgcgaccaattattcccttagtaatgatgggaatttttttattcgttttaaatcaagtaatcctaatgcgaattggaatacatcatcaggaatatggacacttggaagtgaaaaagttttttgtctcgaatatgatattgcgactgaagtaggaaattcatatgttccaactgatgagtatacaacatatagtgcgagtaagaagaaatatgtgaattatatagcctattttggatatggttataaaggcgataagtcttatgagagatatgctgcaacgcaatttgcattatggagctatgtcagtaattatgagtattcttttgcagcttatgatggaacgatgcctaataaatcggcatctaccggaaaagctaatcatcgtttgaattatgatgaatttattaaggattataatgaaatcagaaaactagcaaaagaacattttgaaatgaaaaaaccttcttttcataatcaaaccattgttttaaatggaattggaaaagaaaatgcgacagttattaaagacaataatgcagtgcttaatgattatgatttattgaaggatagtggtttacatgttgaaaaaaatggtcagtcattaaagatatggacagatagtttgtttgatcaaagtcgttcttgtcagttgatattaggggatgaaaagcgacaagatgaaatgggaaaaccacttgtctatagtagtggaaaagctcaaaaattattacgagcaggttttggtgatgcagattatgcaaattttcaagtcataatgggaaccggaagtttgaagcttgctaaaaaagacaacaaaggtcaatatgtaccccatgttgaatttaaaatttcttataacagtgatatgtcctcaccactagggacatatacaacttcatcagatggaacagtgacaattaatgatttatacacaggagcaatttatatccaagaaacaaaagttccaagtcacttgattttggattcaacgattcataaggttgaaatagagacagataagacaacaacctttacccaaatgaatcaatggaaacaaggttatattcaggttacaaagtatgataagaaaaccaatcaagtggttcagcaagcaggcgtggaatttgatatcttaaaggatgatcaatggattgaaacaatttcaacaaataacaatggaattgctaaaagtggtttgcttgattatggaacttatacaataagagaaaagaaagctccacaaaattacgtcattgcaactttaacagaaagtcagtttgttgaagaaaatggaaagatttatgaaattgctatttataatgaagcagttgttggtgaaattgaattgattaaagaagatcgagaggttggtcatgcgcaaggggatgcaactttagaaaatgctcaatatgttttaaaagcagatgaacctattttaaatccaagtgatggaagtgttttatatgcaaaagatgaaatcatttcaatcaaaacaattggaaatagtacatggggagatgtaggacaacaaaatacagataaagaagcacatattcactggtcaaatttaccaatgggtatttatagaattgaagaaataaaggcaagtcatggatatcttaaagacaataatcatattgttcatctatcgtctcataattcaactcaaaaagttgttttagaaaaggtgatatctaaagaacaagtgataaaaggaaaactagaagttgccaaaagcggaaatgatggtcaaagtggtgttgttcaaggcttacaaggtgttgaatttacgatgaagctttatagtgaagtcaaaagtgtaggatggcagaaagcaaaaacttatgcgattatcaaaactgatgaacaaggacgagggaaaagtgaagatattccttttggaatgtatttagttaaagaaacaaagactccagataattatatggctggtggtgatttctttgttgatattgataaggatcaagaaatagaatatcgaatggtgaataatgccccatttaaggcatggttaaggcttatcaaagaagatgaaaaaggtcaaaagattactttatcccatgcaacttttaagctgaaagataaggacggtcattttattaaacaaaaagttggtcttaatgaaaaagatcaatgggaaacaaatgaacaaggaatagctgttttagataatatgttagtacaaggtgaatatacgatttgtgaaataaagtcaccacaaggatttttattaggagatgaaatcaaggttcatatttcatctcatcatagtgatatgacttttgatgaagataatgaaccaatgattacagttaagattgttaatacaaaaccaactggtaaattgattttacataagaaatttgaagggaaaaaagaacttattaaaggagcatcatttaagttaattgctaatagtgatgttattgatccagctagtggaaaagtgatttatcatcaaggagaatttgttcatttaaccggtgaaaaagatggaatatatcaagtcaatgaaaagggaatgctagaaataaaggggattccattaggtacaggtaaagtcacttataagttagaagaagtgtctactttagagggctatcatttattagaagaaccgattctttttgattttgaaatgaaagatatgacaactcaggaatatgttattgaaaaaacagttgaaaataaattgacagaaacagaattttctaaaacagatattttaggccgtgaattatctggagcatatatgcgcttaatagatgttcaaggaaaagttattgatgaatggatttcaacagaacaatcgcatcttgttaaaggattaatttataatcaagtgtatacactgattgaagatcaagcaccattaggttatgcaatagcttcttctataacatttacttattcaaaagatatggaaaaagttattatggaagataaggtcgtcgaggttaaaaagatagataaagatggacagatgctcaaaggtgcaaagttacaagttgttgatacgaaaacgaaaaatattgttgatcaatggattagtgatgagacaaagcatcgtatcaatggacttattgttggtcatcaatatcgtttagaagaacttgaagcaccatatggttatcatacttcacaatctattgaatttgttgttgatggtaaggataatcaaaatattgaaatgattgatgaacaaattcttacagatatatctgttatgaaaattgatgctcaaagtaaaaagccaattcaatcattagattttgaatttggtttatatgtggatgaagcttgtacaaaacctatggaagttatgtgtgctaatcaggatattggaaatgttatatttgagaatttaccttatggaacatattatatcaaggaaacaaaggctcctcagggatatcaattgagtcatgaagttaaaaaaatagtgattgatgataaattagaaggcgtaggaaaagaaatttgtattttgtatgaaaatgaacgtattcccaaggttgttgttaaaaccgaagatcaaacatctttatttgttttatcaacacttatgattttatcaagtatttcaatactgttatctttaagaagaaaaaagaattattgatatataaaatgaggtaggtcatttgacctacctcatacatagcttttgattataagtttaataaacgttttgtatctcttgcaatgactaattcttcatttgttgggataacataaactttgatttttgattctggttttgtgattaaacgttcaccatcaccattttcattagcatcatcatcaatgacaatacctaaggcttcactaactaatgaaagaatttcttttcttgcataagcagaattttcaccaataccagctgtaaaggcaattgcatcacatccacctaaagcaataaaatatctaccaatataagcaataacacgtctaaagaaaatatcaatagcaagttttgctctttcatttccttcatcagctgcagctaagacatctctaaagtcactagatacacctgaaacacctaataaaccagattctttatttaacatacggataacatctttcatatccataccaacttgttcaattaaataatcgatgattgatggatctaagtcaccactacgagttcccatcataataccagctaatggtgtgaatcccattgaagtattgatagattttccatctttaatagcagttaaagaaccacctgctcctaaatgagcaacgataattttagaatgttctggatttcctaatttttcaataactctttgagaaacatagtaatgtgaagttccatgagcaccatattttcttactttataatcagtatagaatttatatggaataggataaatataacattttggttctaatgtttgatggaaagcagtatcaaatacagcaacagcaccagcattaggaatcgcttctttaaaagcataataaccagttaagtgagctggattatgtaaaggagctaaagattttaattcatcaattttattaacaacatcttcatcaataattgctgattctttaaaataagaaccaccttgaacaactctgtgtccaacacctttaatttcatctaatgaagttacaatatttttctccattaatgtatctaataataaatgaacagcttctttatgagttggaatagctaaagtacgaacatctttttcaccgttatatttgattgtgaaaatagaatcttccataccaattctttcaatcactccagaagtaataactgtttcattatccatttcgaataattggaattttaatgatgaactacctgcgttcactgcaataacttttgacatatatttcgtcctcccttaattcccttttattatagcattaaaatgaaaaaaaactagggaaaagtacgtgaaaaaatgaacaaatagacaactgagttaaaatatgtcaaataagttaataattccttgatatcttttgatttagggttataatagttatcgagccaggggtgcttttgctgagaaaggtagaaaccttatcccttatcatctgaactgggtaatgccagcgtagagagtgcaaatagtgatttttttgctttcttacgctcgtaggagagcttttttatttgcaggctccaattttatataaaatggaggagaatgaagtgaaaaaattatttgaagtggacttgaatgtcaaaacaatggtccaattagcgatgtttatggctttaacaattgttttagggtatgtaaataagattattccagaaatgccccaaggaggaacaatatcaatcgatattattgctattttcttatgtgcttatttgatggggactggatatggtgttatttgtggcgtaggggttgctattttacaatttgccttaggtatagcaagttattggggaccttggtctgtattgcttgattatgttttacctttagcagtatgtggtttggcaggattattaaaatcaacaaaaattggaagtgtaccaatttattggggaattatttttgctatgtttttaaaatatatatcacattttttaagtggtgcatttttgtttgctgaatatgctcctgaaggaatgaatccaattatttattcattgggatataatttaccatataatttagtcacaatgattctttgtatggttgttgttcctattttatgtccacgtttaaaatcagtttttcataaatagttgattattttctaagacgtacaaagtacgtcttttctattatgatgagataaaatttatattaatatgtgaaaaaataaactttgatgagatatctgtgatattcatcaataataaaactttcaaaaagatgtatttttgtgtataatgtttatgttattgagaaagaggtatgtttatgaataaaccattagtaggtcatgatgtgcttattcattgttataagcatgatggaaatattcatcgctgttggaataaaggctttgttttagaagaaacgagtgaacatttcattgtgattaataatcgaacgttagttactgaatcagatggtagaaagtggtatacaagagaaccagctatctgttattttccaaagcatgagtggtataatgtgatatgtatgattcgtaaaaatggtgttcatttttattgtaatattgcttctccaacactttatgatggggatgcattaaaatatattgattatgatttggatttaaaggtttttcctgattataaatataaaatacttgatgaagaagaataccgtcaacataaagaacaaatgaattatggtgaagaattagatgatattttaaatcgacagttagatgaattgattcaaatgacaatgaatatgtctggaccatttagaccaggatttgctgaacattggtatcatgtgtatcagcaacgtatacaaagaagatagaggaggtattgatatgattcattttcaaagtgaacaagcaatgattgattttggtgaaaaacttgcaggattattatttcctggttcgattttaactttagaaggcgaactgggaactggcaagacgacattcactaaagggattggaaaaggcttaggcattaagaaagttattaattctccgacttttacgattgttaaagtttatcaaggaaaacttcctttatatcattttgatgcttatcgtttagaaggtcaggatgaagaattagggtttgaagaaatgtttgaagatgaaggggtttgtgtgattgaatggcctatttatattcaagatattttaccttcagaaaagttggaaattcaaattttgaaaaatgaagatgaatcacgttcaatgattttaaagcctcatggtgaaaaatatgaaaaaattgtaaaggagttaggactatgttaagtttgataatggatacatctaatcagtatttaatggtttcattatatgaagatgatcaatgtatagaaacgattcaagaattagggtcacaaagacaatcagaaaatgctattccatatcttgcttctttattagaaaagcatcaaaaagaattgttagatattgatgaaatgattataacttgtggaccgggatcatataccggtgaaagagttgcaatgacaattgcgaaaacactaagtgtgatttcaccagttaagattaaagtcatatcttctttggcagcttatgcaggaaagcaaaaatgtgtttcggttatagatgccagaagtcaaaagatttttgtttgtgcttatgaatgtggaaaaccattgattcatgaacaattattaccaatctctgatttcatggaatttatgaaagattatgaaggatttgatgttgtgggacaaacacaagttgtcaattatccaatgaaagaggttgatttggctcatcatttatatattcttgctaaagatgaagaagctattgataatgtagatgctttggtgccacgttatttaaaagacgttgaggcaaagaaaatatgcttataagagctatggatattgatgatttaaagcgggttgtagaattagaacaaacactttttacatcatcttggagtcaagcagattttctttatgaaatattagaaaatcaattttcatttaactatgttttagaattagatgaaaagattgtaggatatgttggtttgtggttaatttatgaacaagcacaaattacaacaattggaatagatcctgattatcaacatcaagggttaggaagatatttgatggaagctatgcttgaactagccagtgaaagatgtgaggttatcagtttagaagtccgtatttcaaatacgaaagcgattgctttatatgaaagtttaggttttgaaaaacaagctattcgcaaagattattatcaagataatcatgaagatgcttatttaatgacaaagagattggagggacaaaaatgagtttaatacttgcgatagagtcaagctgtgatgaaatgtcaattgccattttgaaagataaacgggaactattatgtaatgttgtggcatcacagatagatactcatcgattatttggaggtgtcgtaccagagattgcgagtcgtatgcatgtagaatgtgtttcaacagttttaaaaacagcattacaacaagcaaatatcaatatggctgatatagatgccattgcagtcacaaaaggaccaggattggttggatctttacatgttggtatgcaggcggcaaaaacattagcacttgcctatcataagccattaattggagttcatcatattgctggacatatttatgccaatgaattggtagaagatattaaatatccatgtttatgtctggttgtcagtggaggacatagtgaacttgtttatatgaaaagtgaattttcatttgaggtcattggtcaaacactggatgatgcaattggtgaagcttatgataaagttggacgtgttttacatttgccttatcctggtggaccggttattgataaaatggctgctgaaggaaagcatgcttatcatcttcctttaccattaaatgatgatagttataacttttcttttagtggtttaaaatcagcagtgattaatttgtgtcataatgcttctcagcgtggagaggatattgttcctagtgatttggcttgttcatttcaagaagtagctttagaagttttggtttctaaaacaattaaggcagctaaagattacaatgttaatgaaatcattgtagctggtggagtgagtgcaaataaaggattacgacaaaagttaagtcaagaaagtccaataaaagtgttattcccaccaatgagctattgtacagataatgctgctatgattgcttcagcaggacgtattatgtatgaacatcaaagattttcaccacttgatttaagtgtgaaaccatcttatgatttagaggaggaaagtgtcgatgaataatgtggagaaaaaacatcaaaagatttcaaaagcaacaatgtcgcgttttccaagatatcttaaagccttgagaaatatgcaacatgaaggtaaagaaaattttttatcaagtgaattagcagaggcaacaggtattttagatacgacaattcgtcgtgattttggtttcttaactgataaagaatctttgggaaaaagaggaattggttatgatacaaaagaaattattaatattttaaataatgttttaggtttaggtttagatgaaccaattattttaattggtgtgggtaatttaggaagtgcgatcttaaaatataatcgttggcaatatactgttggtaaaattgtttgtggttatgatcaagatcaaaataaagttggagaacgatttggagtaaaattaaatcatattgatgatttagaaaaaactttccctaagggatgtaaaattgcaatcttggcaattagtgataaagttcaagaaaccgtagatcgtttgatggctttaggggtgaaaggaattgttgattttactcatacccattttactgtgcatgatgatgttgttgtccaaacggttgatgttgttgtggcaattcaagaacttgtcttaaaaatgcatgcaaatgatgaataatctttaaaaagtattgaaataatcacgaaaagatgttaataatatttgtacaggttgtgatttgagaacttattttcaattttgactagaagcgactcttggatggtgaaagcaagagagccaaagaaaataaggaacactcaatgaactggataggagaaatgaaagtagactatcccgcaagacagcgttagagtcctagagtgcataattttaaaaattatgaataaggatggtaccgcgatatcagtcgttcctttgtaaggaatggctttttttatttgaaaaaggaggagaagaaatgtttgaatttatgacagtaagagaactctatgaaatggttatgtcaggtgaggagttcgaaacagaaagtttagagtatgtagaattagatggttgggtgcgtacaaatagggataatggaaaagttggattcattgctttaaatgatggaacatattttagaaattgccaagttgtttatttgaaagaaacattagataattatgatgaagttaaacgtattagtacaggaagtgctattcgtgttttaggaaaatttaaattaactcctgaagcaaaacaaccttttgaaattgaagctacacaagttgtgattgaaggggcatgtgatgatgattttccacttcaaaagaaacgtcattcttttgaatacatgcgagaaattccacatttaagaccacgtgccaatactttttatgcaatgtttagattaagaagtgttttatcaatggctattcatgaatttttccaatcacaaggatttgtgtatgtgcatacaccattaattacaagtaatgatggtgaaggggctggagaaatgtttagagcaactaccattgataatactgatttcgataaagatttctttggtaaagaagcatttttaacggttactggacaattacatgttgaagcattctgtatggcttttagagatgtttatacatttggaccagcatttagagctgaaaattcaaatacatcacgtcatgccagtgaattctggatgattgaaccagaaattgcatttgctgatttagaagatgatatggatttaattgaagatatggtgaaatattgtattgaatatgtattagacaatgctcctgaagaaatgaaattctttgaacaaatgattgataaagattgtatcaaacgtatcactcatgtcagagatagtgaatttaaacgtatgacttatacagaagcaatcgaattattagaaaaagctgatgtgaagtttgaaaacaaagtagaatggggtatggatttaaacagtgaacacgaacgttatatttgtgaacaaattgttgggggtccagtattcttaacagattatcctaaagaaattaaagctttctatatgcgtttaaatgatgatggaaagacagttgcagcttgtgacttgttagttcctggtattggtgaattggttggaggaagccaacgtgaagaaagatatgatgttttagaaaaaatcatggatgaaaaaggaatggctaaagaaggccttcaatggtatatggatttaagaagatttggtggatgtaaacatgctggatttggtttaggttttgatcgtttcttaatgtatttaactggtatgcaaaatatcagagatgttgaaccattcccaagaacaccaagaaatttaaaattctaagggcgaaagataaaattcgctcttttcttatatattcaattgattatttttgtagtataataaacacggcgaggtgagaaaaggtgagagatattgattttattaacactttttttaatatcgtttatcaaaatgaattggcctatatgcgagattttacatcttcttatgaatatatccaagctttttgtaaatggttagaagatcatcaaattccttgtacagttctaaaaacaattacaaaggaaaattttatgatgttttcaaaaaaaatgatggcagaagatattgattatatattacataacaaattttctaaatctatgcaggaattatctgatcaatatattgatcaaacacatatcctttatattcctggttttcaagatgaacaacaattcagtattgattttctaaaatatcaggatgttaatttctataccattaaagaaagtttcttaagaagtgatttatctttctttgatccttttccagcatttttctgtgcaatgaatcatgctgatttatggcctggatttttgatttttcaacatgaaaaacaagtctttaaaccacttcgttcaaaagatgaattatctgaattatttaaacatattgaaaatcatgaagatttatttaaagtttataatgattatgaaaatgattcttattttattcaattaagtgatcttcatttaggacaaaataaacgtcaaaaaggattaatgcaattatataattcattagattatattgttcctttattaaaatcaaaagagaaattaaaggttctcattacgggtgatttaatggaatcaccaaatcgtaaaaatatgtatttagcaaatgattttatgaatcgattaaaaaaacaatataaagcagatgtgacgtttattttaggaaatcatgatgtcattgttcatggctttaatatggctagaaatcaaaagagtaaagtcattgcttatttattaggtgaaagtattaaggttattgaagatgaaaagattattttgattaagatggatacaaccagtgaaggcaatttagcacgtggaaaagttgggcatcgtcagttaaatgaaattgatgatgaattggaagctattgatcatttagaagattataccttgattttgatgcttcatcatcatgtttatccgattagtaaagctcaatttattaaaacaaaatggcatgaaaaaacgtttattaatcggattgtagagacatcaaaggttttaatggatgcgcctgatttaattcaatggattgaaaagaaacatatccgatatatatttcatggacataaacatttaccattctttagaaaagaaaattatgcctattatattggggctggaagtgcaactggtggattgaaagaaagtaaaagtcgttatatttcatataatgtagtaaaatataatcgatttgatcaaaagatgaaaacatgtatgattttttatgatgataaagctaaggctgaaagacaacgtgttgaagtctatttatttgaggagggtgtagagaatgaaaatagttgataaaatgaaagatgaggaattagggttagctttgttatataactttacaaaaggttatggggcacctgttccaatggatttatatgatattgttttaccaattctttatcatgattccattcgtgatgaaatcttaaaatatgattcacttgcaagctgtttaatagcatgtgcaaaatcagaagaacattttaaagaaaatcttttaacaagtattgaagattataaaacgatgacatctaaagcattaggaatggcgatgattggacatattttgaattttcagattgttgatcaaacaatgtgtggaattgctttaaaatcttcgattttagatttaaatgaggctattcatttgggtgagatgttaaaaggaaagagttaccatgatgtaatgagcttattaaaagcgcaagaagttaagattgttatcttgcaaagtgcatctgttggaaaagatgtggatttatcaaagtttcaaactttaggaaatgttgtgatgtacgaagatacaaaacaagatgaagtaagagaacgtattttagatgctcaaattgtcattacaaataaaaatcaaatgactgctgaagtcttagaaggtttaacacagttaaaattaatttgtttatttgcaactggaacaaataatgttgatttacaatattgtcaatctcatggtattaaagtagcaaatgtcaaagggtactcaactgatacagtagctcaacatacactagcattattgatgcacttggttgaaaaaaatgcaacatatgatcattttgtaaaatcaaaacaatatactcaaagtggacgttttagttattttgatgatgttttccatgatgtatcttcactaacttggggaattgttggattaggtgatattggacgtaaagtcgctgggattgcgagtgcaatgggggcaaaagttcaatattattcaacaagtggaagaaatgcaacaagtgattatcaacaagttaattttgaaacattgttgaaatcatctgatattattagtattcatgctccattaaatgaaaatacaaaatatttatttgatgaaaaagcattacgtcaaatgaaagaaaatgcttatttgattaatgttggacgtggtggaattattgaagaagaagctcttgttaaagttttaaatgaaggtcatttatctggtgtaggattagatgtttttgaacatgaaccattattagaagatgatgttttatatactatcaaagatatgtctaaagtgatttttacaccacatattggttggggttcaattgaagcaagacaaagatgtgtaaatgaggtttatgaaaatattttagcttttttaaagggtgaagatcgtaatattgtcaatgcataagagaagaaaaatcttctctttttttgtaaaaaaaggaaatttaagtaaaaaaatgttgtattttgatagatttatcgttaatatatagactatatattatgaagaaggaggagtctacgttagtagcaaagaatgtacggtcttttgatcggaattaacgcctgtggactagaaatgaggtagaagcaggaaaaaatttgctgttgaagtagcattatgttatggaacagattgttattgcaattattattattgcgcttggtttttatgtttttaaattttatccttttgaaaaaggaaatgtcatgaaattagtcattgcagctatttttattattttaactgcaatatgtaaaagactagccattatgattcctttgtttggtgctgaaagtttgaaaattggatttgaatatattccgttaatgttagcaggatatttcttagcacctagttatgcctttttagttggtttatgtagcgatgtgattggattgattttggttcccacgggttttccgttttttgggtttactttaggaactatcttagtgagtgtcattccttcattagtgaaagaacatgcaaaaatggtaagtgagaaaaatgttcaatatattgtcattggacttatttctattttaggaattggcgcgtcagtttatgtctatggattaaatgaaataactatttctcaaacacttcatgtcataacttcacaagaaaagataactttgatttctatttgtttagcattaacagctatctttattatcttaatacttgtcttaaaaagacagatacatgatcaagaagcaaaggaattttcgacttggattctttgtgtcactttagttgaaattgttgttacattgtgtttaacaccattatggttagatatgatgtataaaattccatttgttgtttctttatgtattcgtgtcattaaagaatgtgctgtcttaccaatagaaatttttattggatatacattaattaaattaatgaaaagaattttattacgattagaacgctaaaagcagcaagatgattattcatcttgttgctttttttcaatgatatgtccatcttcatcaatttcaacaacttcaaaataacgatagaaaatggaatgaatccaagcttttatttttttcatcgttgtccctctttttctatgatatgccagatattgaaaatgatgtttgaaaatctaaaaaatgtaaacactatatatgaggtgagaatgtggatagaaaagaatatgatcaaatggctgatgaattacagccaacgggtcacaaagttaaaaacggttttaatgcttttttatatggtggcgttatgggtgtcattgctcaaggggtcttggatttttatatgaatatacttgatgtgagtgaaaaagatgctacaccaatgatggtgattacgcttgtttttgttgcttgtttactaactggattaggactctatgataatattgccaaacatgctggggcaggaacttttattccgattaccggttttgctaatagtatgacttcaagtgcactcgatagtaaaacggaagggctcattatgggaattggcagcaatatgtttaaattaggagggactgtcattacttatggaattgtcagtgcttcattgttaggagtgattcgctatgtcatcgcacttttatggtaattctttaaaattagaaaatgtttatattgcatctactggttcagtttgtggtcctttagaatttcaaggaccattaggggcatattttgataagagctatactgattatcattgtaatgaggattcttttgaaaaggctgaacgtaaaatgttacgcgatgctttagatatatgtttaaaacgcgaaaagttaaaatataaggacattgatttatatcttggtggagatttaatgaatcaaattaccacagtccattatctagcaagagagttacctaaaccttttgttggtatttatggagcttgttcaaactttgcattatctatggcgatgtctgctttgataattgaaggtggtttcatgaataagattgtggcaatggtttcaagtcataatgcaacagcggaaagacaatatcgttatcctgttgaatatggtgtgcaaaaaaaagataccacaacttttacggcaacaggagcagttgccaccttattaacaaatcaaaaaacaccagtcagagttgaagctataacattagggaaagttgttgattattcacaaacgaaccctaatgatatggggcgagctatggcaccagcagcatatgatacaattatgcaacattttcaggatttaaaaagaggttttgaagattatgatttggttgttacaggtgatttatcaacttatggacatcaaattttaaaagaaatgttacaacgaaaaaaagtcaacgttgtgcattataatgattgtggatgcatgctttatgatgttaacaatcaagaagtatttcaaggtggaagtggttgtgcatgtagtgccttggttgctatgggatatttatatccacaattaaaagaaaagaagttaaaacgtatattagtcgtttcaacaggagcattactctctcctatgatgactaatcaaaaagaaagtattccttgtgttgctcatgcagtgagtttggaggttagtgaataatgaattatattatgtcatttttatttagtggattggtttgttttttagctcaaataatttatgataacagtaaattaacaccaggtcatattaccagtctttttgttgtcttaggttcatttttagatttgtttcatatttatgatcgtttaatcgaaatctttcatgctggtgcacttattccgattacgagttttggtcattctttaatgcatggcgcaatggcagcaacgaaacaatatggaatctttggtgttgctattgggatgtttgatttaaccgcagcaggaattactgcagcaattctctttggctttttagtggcgattatttttaaaccaaaatcatgaatgattcatatgatttaaaacagcgtgtcttaaattttagaggaaggctgatttatctttattttttagccagtctttctaatgatacattgatttcacgtttagttgaaggaatagaaaataatcaaggaaaagatttagagaattgtttaaatatgggtgatgttgaaattgtgaaaacgaatgatattcaaaatattcaatacgccttaatgtgtggaaactgtgctttatttgatggtgaaacaacatatgttatggatactaagaactatcccaatcgttctattgaagaaccagaaactgaaaaaagtgttcgaggagcgaaagatggttttaatgaatctatattaaataatacaggattattaaggagacgtctaaaatcagtagaattatgttttcataaagaaacaattggtacaaaaaatcccatggatattgcagtggcttatttagaagataaagtcgatcgtcaggttttaaatcaggttttatcacgtattcaagaaattcgtgcacaggaattaatcatgagtgatcgtgcaattgaagaattgttattggatcaaggatacaatccatttccacttgttcgttatagtgaaagaccagatattgttgcaacgcatattcaacatggttatattgctattctttgtgatacatcttcatctgtcttgatgttaccaacaactatttttgagattttagaacatgttgaggaacatcgtcaaacaccattaattggaacatttattcgtttgattcgtttaagtgctgtcttactttctatttatcttgttcctatttgggcattagccgtttcttttatgaaatgggattggactttctttgttcaaattttacttgttgagttgtctattgagctattgagaatagcaaccattcatacacctgaatcgatatctaatgcaatgggattgattgcagctttgttattaggtcagtttgcgattgatttaggattcttttctgaagaaatattgttattttgtgcagtaggttcaattggcggatttgcaacgcctaattatgaattgtctttaaccaataaatatattaaagtcatgatgattttaagtgttatgtttttgaatatttttggttttgttatttttaatatttgtttatggatttatttagcaagattaaaaccatttggaatgtcttatttataccctttgattccatttgatttcaaggcatttatacaatttttgattagaaaaccaaagaaaggcaaatgaatgccttttttctttgtcaaaagtttgttagaatagagatggaagaaaagaggattgattataatggaagaaaaggtttatcaaacatatgttcaagtattaaaagaagaacttgtcccagcaatggggtgtacagaaccaattgccttggcatattgtgctagtaaatgtcgtgatgttttagaagatgaggtaatcagtgttgaaattaaagttagtggaaatattgttaaaaatgtaaaaagtgttattgttccaaatacggctggattaaaaggtattgaagcaagtgttgcggcaggaattgtagcgggtaaaacaaatcaaattttagaagttattgcaaatgttaatgatgaacaaaaacaacaaatgcgtgagtttttacaaaagattccaatgaaagttattcctattgaaagtgaatgtgcattagatattgcagttcatctttatggaaaaaatcatcaggctattgttcgtattgcaggttatcatacaaacattgtttatatgcaaagagacgatgaagtcttgtatcaatctggagttgtggcttcatcagattcatcattgacagatcgtagtcttttaaatattaaagatatttatgagtttgccaatgtagttaagattgaagatgtgaaagatgttttgcaaagacaaattgattataatttggctattgctaaagaaggattagaaaataattggggtgccaatattggtagtgtgattttaaaaacatatggggatgatattaaattcaaggcgaaagcttatgctgctgctggtagtgatgcaagaatgagtggctgcgaaatgccagttattatcaattcaggaagtggtaatcaaggaatgactgcttctttaccagtcattgtctatgcccaagaagaacaagcgactcaagaacaattatatcgtgcattggttgtttctaatttatgtactattcatcaaaagactggaattggtcgtctatcagcatactgtggagctgttagtgcaggaattggagctggatgtgggattgcttatttaaaaggtggcgattatgaaacaatttgtcatacacttgttaatggattagcgattgtttctggcattgtttgtgatggtgctaaaccatcatgtgcaggaaaaattgctgcgagtgttgatgccggtattttaggatactatatgtataaaaatggctatgaatttaaaggtggagatggtattgtttctaagggtgtagaaagtactatccgtaatatcggtcgtctttcaagagagggaatgaaagaaacggataaagaaattattaaaattatgtgtgattaataaagataccttgaaaaaggtattttttgaataaataattgttttcttttgacactagagattgagataaagaaaaataaagaaatttataaataattatgttataatacgtttcaggagtgtgatgatatgagttatgaagttgttcttgatgaatttcaaggtccgttagatcttctgttacatttaattaaagaaaaggaaatggatttagaatcattagaagtttctgttattactgatcaatatttagcttatatagatcaaatggatcctgatcaattagaaacaatgtctgagtatcttgtcatggcagcacaattaattgaaatgaaaagtaaacttttattacctaatgaaaaagttgaacttgaagatgattatcaagaagatccaagagaacaattgattagacgcttaattgaatataaaaaatataaagacgttttagatgaatttagagattgttatgaacatcgtcaaacacttcataccaaggcaccagcattaatggatgattatattgttgatacgactgaaatgattcctcaagacttagaggtttatgatttaattagagcaatgcaaaaaatgtttcaaagaaaagcattgatggctcctttggaatcaaagatagcccgtgttgagatttcgattgaggatagaagtgatcaaatccgtcagtattttcgattacataagaatcaaagagtagattttgaagaattatttgatgaaccaagtcgtactttctttgttgttacgtttttatctattttggtattggttaatacgaatgaattagttattgaacaagaaggtaattttgaaaaaatatatttaaaggagagaaattaatggagcataatgagttattaagtatcattgaaggaatgttatttctttctggagatgaaggattaaccattaaacaaatctcatcagttttacaattaagtaaaaaagagacaacagattgtcttgatgaattaatacaaattgaaaatgaaagaaaaattaaaggatttgaattggtgaattttggtggtgtctataaatttgcaacgctttctaagcatcatgaatactatcaacgaatggtagaacaaaatgaaaatagtttatctaatgcagctttagaaacattagctattattgcttataatcagccaattacacgtgtacatatagaagaaatacgtggtgtaggatgtgatgcaatgattcgtaaattagtggctaaagctttgattaaagaagtagggagagaagatactcctgggaaacctattttatatggggtaactgatgaatttatggatgcattttcattaacttcattagatgagttacctgaattaaaggaaatgaaagaaaactttgatcaagatgatatttttaatacgaaatatacagaggatatatctgaggaacaatagttccttttttatttgacatcgtagttagcttatgctaacatatgtaactgtgataagttagttgtagctaactaaaaggaggatacgatgtttgataaaagattattgagagcagttcctaagacaaaaacgtttgtgatgaaacaagtgatgagtcaatggattgctttattaatgaatattgtttttacaataatgatttgttttctttttacttttttgttagaaaagcgattagaaatgaaacatctgatatatgttggaatgattatgattgtcattttaagtattcgagctaaagctttgaagaaagcaattcttttttcttttgaaggagcaaatcttgtgaaaaagattttaagacagcgtctttttgaaaaggttttaagtttaggaaatcattatcaggaggctgtatcaacaagtgaattagtacagttatcagttgaaggaattaatcaattagaaacttattttgcgttatatttacctcaattgttttatagtgttttggctccaataacactgtttattgtcatttcgttttttgatatcaaaagtgcttttatcctttttctatgtgttccattgatacctttatccattatttgtgtacagaagtttgctaagaaattactttcaaagtattggaatagttatacaacactaggagatagttttttagaaaacttacaaggcttaacaacttttaaaatctatcaaagtgatggatttaagcaacgacaaatgtatcaagaagctcaaaattttagaaaagtgacaatgcgtgtattaattatgcaattaaatagtatcagtattatggatattgtggcttatggtggagctggtttaggaagttatatggggataagtcattatatgaatgaaagtattagtttatttggagctttattaattattttactgtcatttgaattttttattccccttcgtcaattaggttcatttttccatattgcgatgaatgggatggcagccagtgataaaatttttaaaatattggatattgaaaataaacatcaaggaaaagaaatgttaaaacaagatttattaaatatagaattttcccatttatcttttcaatatgataaacgatctattttaaaagacatatcttttaagattcaagccggacaatttattggtattgttggtgaaagtggttcagggaaaagtacaattgcaaaattagttatgggaaattatcagcattatgatggatctttattgattcaaaatcaagaaagatacgatattgcggatacatcatttttaaaaagagtcatgtatataacccatgaacccatgatattcaaaggtacactaagagataatcttgatttttatcatcaatatagtgatgaggaattatatttagctttaaagaaagtttctttagatcaatattttaaacagttagaaggattggacacattgatacttgaagcaggaagtaatttatctggtggacaaagacaacgcatcaatttagctagagctcttttggctgatagtgagatttatatttttgatgaggcaacgagtcaaattgatgttgaaagtgaagaaagtattattgcaattatcaaagaattggcacgtacaaaaaccattattatgattactcatcgtttaagtacagtgactgattgtgatgaaatattagtcatgcaaaaaggacaattgattgaaagaggtaaacatcaaaaattaatgttagaaaatggcgtttatcaaaaactctttcatcaacaaaaagaattggaggcatatcaaggatgaaaaaagaacttaataattttcaagttgtatggcgtatgatgaaacttgtaaaaccattagttttaccaatgtgtttagcgattatcatgggagttgttggtttcctttgtgcaattggtatccccgttttatcagttatggcattatttcaattggtagggatgtatcctcatttaccactttcatcattattaataatcttattagtgatggctttattaagaggtgttttccattatatagaacaagctgctaatcattatattgcttttaaattattagcaattatccgtgatcacgtttatacagctttaagacgtttagcaccagctaagttagatggaaaggataaaggaaatttaatttcattgattacaaatgatatagaattattggaagttttctatgctcatacaatatctccagtgtttattgcgatgataacttcattgattttattaaaattctttgcacatatgcatatcttggcaatgttcattgccttgatagcatatttgataatggcgattgttattcctttttatgttaatcacaaaggaaaagaaattggtcaaaaaaatcgtgatgaaatagggaatatgagtacttatattttagaaagtttaagcggtttatcaactttattacaatatgatattggtggtttacgtaaacaaagaatgttagaaaaaaatgatgagttagaaactttacaaagacaaatgaaagatattgaatcagtgcaagttgtgatgtcacaactgcttatctcacttttttctatcattatgtttatcactatgtttattttacaacaacaaggcattgtaagtgtttttgatacaatcatggcaacaattttgatgctttcaagttttggtccagtgatggctttatctcatttagctaataatctgttatcaacattaagtagtggacgtagagtgatagcgattcttgatgaaaaagaattaataaaggatgttattgatcaaccaacaatatcatttgatgatattgaaattgatgatttaaattttgcctatgaagatgaaattattttaaaaaatttgaacttaacgcttactaaaaatcaaatcactggaattgttggaaaaagtggaagtggtaagtcaactttacttaaattaattatgcgtttttatgatccaacaagtggccaaatttctattcatgattgtgatttgaaaaagattaacacagccaatatgcgcgcaatgtttgcctatgtaacccaagaaacaatactttttcatgatacaattcttaacaatataaaaatagctaaattagatgctacagatgatgaaatttatcaggcatgtcaaaaagcgagtatccatgattttataatgagtttaccggctggttatcaaacacaattgagtgaattaggagcgtctttatccggtggagaaagacaaagaattgcattagctcgggctttcttaagtgatgcgccatgtattttattagatgaaccaaccagtcatttggatgtgttaaatgaagcaattattttaaaatctctacaacaacaaaaagacaaaacaatgatattggtaactcatcgtgaatcaactatgaggattgctcaacaaattattcatatgaatcaaggaagggcaagttaatgaatttacaagcaaaaagacaaaaagaaatcaaaattgttatttcaatgattcaactttattgtcgacatcatgatgatattgatgaacaagaattaattcaatacgcaataagccgaattgaaaaatgtccaatgatgaaagataaaacattttgcagtcgttgcaagattcattgttatgaaaaaaagatgcaagaaaaaataaaaaaagtcatgcgttatagtggtccaagaatgatttttcatcatcctttattaactattcgccatgctttacatatctaggagacaattatgaaatatatttactttatacttggaatgatttgttttattttagctactattggcgttattttaccgattcttccaaccactccatttttactcgttgcggctttttgttttagtcgaagttcctatcgtgttaacaattggtttttatcaacgaaactctatcaagatcatttagattcgtttattaaacaaagagccatgactttaaaaacaaaaatctatatcttaagttttgccagcattatgttagcatttcctttatttttatcacaaaatgtttatatcagaatcttcattattctactttatatctttaagtattattactttacttttaaaattaaaacgattcaaagtaaaaaaatattataaaacaaaaagcccttatgattttgcataaggactttttacggtttattctgatacaacagtaacgttagctgcttgaggacctctatctccttcaacgatgtcaaattcaacagtttgtccttcttctaaagttttaaatccatcagctttaattgcagagaaatgtacgaaaatatctcttgcttcaccttcaagagtaatgaaaccataccctttatcagatttaaaccattttactttacctgtactcattatgaagtacctccttcaatgtttcgcaaaaaaatagtacttcatttctaaaccattattaaagaatctttaataccttttgaaaatacgtgctatgttcctttgctaaaaacattataacatactctttttgtgcatacaagttcttgttgactttgaaaaataaatgggtatcatttaattatggaaaagaaaaggtgggaatcatatgttagaaaaatatgcagaattacttgttaaacaaggggttaatttacaacctggtcaggaattggtcattgattcatcaattgaatgtttcgaacttgtgcgagcagtcgctaaagtggcttatgaagttggagcaaaggatgttattgtcaattatactgatgaaaaaatttcacgtttacgttatgaaaattgcgatattgaacattttgctacaataccacaatatatcatagaattaaaaaatcaatatgctttaaaacatgcggcagttttatctataacttcaagtgatcctgaagcaatgaaagggattgatcctttaaaaattcaaacttatcgcaaagcattaaaaacagcttgttcaacattttatgatcatttagatttaggaattgatagatggtgtattgctggtgcaccaagtgttgcttgggccaataaagtatttcctgatatgagtgataaagaagctgttaatgctttatggcaagctatttataaagttacacgttgcaatcaagataatccaattgaagcttggaatgaacatcgtcattcttttgaaaaacgtgttcaaattcttaatgagaaaaaaatcaaatcattgcattatacgaatcaattaggaactgatttaacaattggtatgaataagggatatttatttgctggtgggggaagctatacaacagatggtatttattctttccctaatattccaacagaagaaatttttacatcgccaaataaaaatcaagttgatggaattgtttatagttctatgccacttaatttcaatggaaatattattgatgaattttctattacttttaaagagggacgtattgttgattacagtgctaaagaaggttacgaagttttaaaaagtattatagaaactgatgaaggaagtcattatttgggtgaagtggcattagttccttatgcttcaccaattagagaactaggaatcttattctacaatacattgtttgatgaaaatgcttcttgtcatttagcaattggaaggggattttctgaatgtattgaaaatggtttagaaatgaataaagaacaattatttgaaaaaggaatcaatgattctttaactcatgttgattttatgattgggacaaaagatttatcaattgttgcaacattagagaatggtgaagaatttattatcttcaaagatggaaactttgcattttaaaattgacaaattcaatgtttttcagtaatatttagacttaaagcgacataaaggagggagaacatgtcagattttattgaagaagttaaaaaacgtagaacatttgcgattatttcccatccagatgctgggaaaacaactttaacagaaaaattccttctttatggaggagcaatccaagaagctggaatggttaaaggaaaaagacagtcaaaacatgctgtgagtgactggatggaaattgaaaaacaaagaggaatttctgttacatcatctgttttacaatttaattatgatggtttttgtattaatattcttgatacaccaggtcatcaggatttctctgaagatacttatcgtactttaatggctgcggatagtgcagtcatggttattgatggttctaaaggggtcgaagatcaaacaagaaaattgtttaaagtttgtgcaatgcgccatattccaatctttacttttattaataaaatggatagagaagcaaaagatccttatgaattaatggaagaaattgaaagagaattaggtgttgaaacttgcgcagtcaattggccaattggttgtggaaaagatttcaaaggtgtatatgagcgtaagaaagaagaagttatccgttttatgcctgtacaaggtggtaaaaaggaagtcgatgttgaaatttgtgatgctcatgatgaaagcttaaaagaaaaaattggtgatcttttatatcagcaattacaagatgatattgagctattagatggtgcaggtgctgaatttgatttagaacgtgtacaacgtggtgaattatcacctgtttgttttggttcagctttaactaattttggggttgaaccattcttaaaacatttcttagatatgacaacatcaccacttccaagaaatagtaatattggtgaaattgatccgttatctgaagatttcagtgcttttgtttttaagattcaggcaaatatgaataaggcacatcgtgatagaatggctttcatgcgtatttgttcaggtaaatttacgaagggaatggaagtttttcattaccaaggaaataaaaagattaagttaaatcagtctaaacaaattatggctgaaaatagagaagaagttgaagaagcttattcaggagatattattggagtctttgatccaggtattttctctattggtgatacaatttgtatgccaaaaaataaatttgcttatgaagggattccaacatttgctcctgaacattttgcgatgataagaaatactgataccatgaaacgtaaacagtttgttaaaggtgttgaacaaattgctcaagaaggagctattcaaatctttactgaacttggtggtggtatggaagaaattattgttggtgttgttggggttttacaatttgaagtattggcttatcgtttgaaaaatgaatacaatgttgatatcgttaatacaccattgccatatcaatatattcgttggattaaaaataaagaaattgatctgaaaaagttaaatctttcttctgatacaaagaaagttcaagatttaaaaggacaatatttattgttgttttctaacgaatggggtgttcgttgggcaaatgataaaaacccagatttacagcttgctgaattttccaataattagtaatgagcttacttttaaaagtaagcttttttcttgtgaaaaacttattaatgtgaaaatggttaggtgccttttttgtcagtacaaaaagtgataaaatactcttgaaggaggtgtcacttatggctaatgatggaaaacgaacatattgtcgttgtattgaagaaatgacaatgattattggtaaagaagaaaccgttctttttgagtttaaagaagtttatccttgtatgattagaacaagtgacacagaaatgaattattataaaatttatggggaagaatttgccttaagttgtagtgaacaagagtttaaagaacattttaaattaattttacaccaaccaatcaagtagatttttgaagatgggtttgttttttagtaaaaatatggtatgatgtcaagagaaagggtgatgattttggcgaaaaaaacatttgaaatatcaaatatccactctgttgaggagttaaataatttaagtttagaactcaattctaaagaacaggtttcacatattaaagtcaataaggataatattgtctttaattgtatagatattgatgcattgtctcatttgattcaaaatataaataaagaattaattgttaaagaagttgttgatggacaaaagcgtcaatatgattttgcacaaaaaaaagaaagtaaacattattttatgtttaaaaatatgattactgaagatgatatttatgttttagtcaaacgtcttgaagaagatcaaagatatcatgatgtttattatgattcacaaaataaagtcttaatgttagtatcttcacaacgtgatgttttaagtctattacgtaaagaattatttaagattaatccatctattgaaattattgaacatcgtaaacctattcgttcacaagatgtttttaatcaaaaatatttaaatacttatattcgtattggtattttacttgttgttttttcattagcgttaattacttctaaagatcatagtcaagtaacaccatttttatggttagcaacgatgttagttttagctgagccattgttgaaaagagtatggacaaaattacgtcataataatttcttagatgaagatgttttggttctatgtgctttattgatgggaatcgcttcaggtgtatatgttgaaacatgtcttgcagtgatattatatcaagtggctggacctatcttaacaaaggtattagagcgctctttacataaaattgatcaggctgtcacaatgccggaaagaggtatgagagttcaacaggatacaagtgaagaagtttcactttatgatgttgagattggtgatgtgcttgaaattaaacctggggaaacaattccaattcctggagttattgttaaaggaagtacaaagttaaatacttattcaaatacaagtacttatgaattggttgatgtaagtgatcatagtgaagttcatagtggagatgtcaatgctggtgaaaattctattcatattcaagttaatgaaacttatgaaagttctaactttaatgaattaatgaatattgcgagtgttgcgcctgtatatgagtcaaaaattgaacaatatacaaaaatcctttcccgtttttatacacctgtaatggtaactttagggattgttctgggtattattttaccaatcgttagttttgatgagtatggtcaatatattcatgttggagcaattttattgattttatctggggctttatcaagtgatcagtcaactgcaattggaatgttagcaggatttgctaaggcttttgaaagtggtattattgttgaatcatctttaggattggattctgttaatgctgctcaaacaattgtttatgatcgttttgatggtgttgaggtaaccgaagaagaattggatttatttaagaagttatctcatatgggaagaactttggttatttttaatgatgggccagtggctttagagaatgatcaatatacaatttataatgatttaactgttgaagaaaaattagaaaagatggattctttaattggaccaattgtttatattggtgatagttttaaagatattgttcttttacaaaagagttatgttggaatttcacgtggaggtttagctgattcgaaggttgttgaaaatagtgatattgttttaattgattctgatttgaataaagtttatgagactttcttaattgctagaaagatgcgtaccattgctgtaggtaataatattttaacgatttttatgaaattggctgttttagttgctgttatttcatttacggctttaccattatggattgctattttggttgaaatgatggttagtgcttttgttatgagtagttcaacatttattttagagtagaatttttctactctttttttggaggaatggataatgaaaattgttgttgcaccaaattcttttaaagaaagtatgagtgctattgaagccagtgaggcgatttttgaagccttagatgcttatggtattgagagtgtattaacgcctttagctgatgggggtgaaggaacgttagaaacattagttagtgctatgaatggaaaaatagaaacctattgggtaaaaggtgtaaggttagaaaaaagagctgtcgctgttggatatgtggatgatattgcgattattgaatgtgcgaaggtttgtggtttggagttattaactgaagatcaaaagaatccttatcatacttcaacttatggattaggtgaattgattttaaaagcacttgatcaccatgtgaaaaagcttatgatttgtttaggtggaagtgctacaaatgatggtggaataggaatgatgagtgctttaggtgttcagtttttagatgaacacaataaaaacgttatgccaacaatggctggacttgctcatattcaaacaatagatgtgtctttgttagatgagcgtttaaaaaatgttgagattataggggtttgtgatgttaccaatccattatgtggagacaatggtgcaacttatatttatggcggacaaaagggtgtaaaacaaacagaaatgtcaaccattgataaggcaatgaaagactatgctaaaaaagttgatgaaatttataattatgattatcaaaatcaaccaggagctggagcggctggaggtttaggttatgctttatgtggcttttgtcaagcaaagttattacctggttttgaagttgttagtgagattgttgaattagaaaaacatattgcaaagtgtgataaggttattgtaggtgaaggaaagattgataaacaaactcaatatggaaagacaccttatggtgttttaaagattgcacaaaaatatcataaagatgtttttgcctttgctggtaaggttgaagatcttgatgttttaaagactttaggttttaaaaatgtttacgcagttacccctgaggatatgcctttatcaatggctttaaaaaagggaaaagagaatctttgtcaatgtgtaaaagcacatatggaggatattaaaaatgaagtataaagttgataaggccatgcctttaatggaatttttattagaagttacacataagaaaagaaatgatattaagaatttattgaaatttgaaaatatttatgttgatgggtctattcaaacttattatgcatatgctttacaggtaggacaaatagttgaaatcaatgtaaagaaagaaagtttgcctttttcaattctttatgaagataaagaattgattgttattgataaaccatgtggattattaagtgaacaaacagctaaagagagtcaaaagacggcttattatattgtgaaacaatatttagctaagaaaaaggaaaatatttttttggttcatcgtttagatcaatatacatctggcattttaatgtttgttaaatcgaagaagctttatgatttgttaactcatgattggaataaatatgtaaaagtcagaggatatattgctattgtagaaggaaaaatgaaacaaccaaaaggaacaattgaaaattatcttgctgaatctaaaacacaaaatgtttatattacaagcaaggacaaagggaaaaaagcaattacacattataaagtcattcaatcgaatagacaatatagtatgttagaagtctatttagatacaggtcgtaagaatcaaattcgtgttcatttatcttcattacatcatccaattatcggtgatgataaatatggagcacacaccaatccaatcaaaagattaggattacacgctcatgaattaatgtttattcatcctttaactcataaagaaatgcgttttatttcaaaaacgccagcgtcttttcaaaaactttttaaaaaaggttgacatatgcgataaaattcgttatgatattccagtaaatgaaaagtagtggaaagaagaagtgcctgcttctcgcctgagtgtctataacgctaggcaaatgtcactaagatacttatcttaatgtcaatgtgggtacttatgtgctcactttttatttgtactacaaaatttataggaggtggctattattagcaagtataacaaccaatcaacaaatgatgacttggtaaatgaaaaaattcgttttaaagaagttttggtaattgatcaaaacggtgaccaattaggcgtgatgtctcgtaatgcagccattaatactgcttatgatgcaaacttagatttagtctgtgtggcaccaaaagccaagacaccagtatgtcgtattatggactatggaaaatatcgttttgagcaacaaaagaaacaaaaagaaatgaagaaaaattccaaggttgtctctttaaaagaaacacaattatcaccaacaattgatgtccatgataagaatgtgaagttaaaaagaactttaaaatggcttgaagctggtgataaggtaaaaatcgctgttcgttttagaggtagacaattagctcacattgatattggtcaaaaaatactagatgacttcgttgctgaatgtgctgattattgtgttgttgaaaaaccagcgaaactagaaggacgaacattgactgctatattagcaccaaagaagaaataacaggaggacagaattatgccaaaaatgaaatctcacagtggtcttaaaaaacgtttaaaaagaacaggttcaggtaaattaaaacgtggacatgcgtatgtttcacatttatctcataacaagactcataaacaaaagaaacacttagcaaaagcagctttagtacacccttcagatatgaagcgtattaaatcaagattacaagggtaattgaaataggaggaaagaaatatggcaagagttaaaggtggatatacaactagacgtagaagaaagaaagtcttaaaattagccaaaggatactttggttctaagcatacattatataaaacagctcatgaacaagtcatgaactcattagaatatgcttatagagatagaagaaatttaaaacgtgaaatgagaaaattatggattgcacgtattaacgctgcagctagaatgaatgacatttcatattctcaattaatgcatggtttaaaattagctaatgttgaaatcaacagaaaaatgttatcagaaatcgctattgctgatcctaaaggatttactgcaattgtagatactgctaaaaaagctttagaaaaataatgattaaagaggctagagagaggcctcttttttattttgttgactgttttatgtattcgttttatacttataaatatgggtttataaggagttggaatggatgggaactttgaagttttcgcttaagatgttgaaaaaagagtataagaaaagtttgatttatattttgacattatgtttgacaattgctgtgacttttttattttttaatattattgataatacatatttgatggaaaaaacaacaatgtcacaacaaatggtcatggatatacctttttctacaactttatcttttattattattatcttttgtgcttttatgattatttttgctaataatttttatatttctagaaagacaaaagagattgctattatgacaatgtcaggatcaggttttattgatacaacaatgtatttgttttatcaaaattttgtgatgaccttgattgcatttcctcttggtatcttcataggtgcattgatatctatgtttgttaatcaatgtatttatcattacctagctttaacgattcattttttctatttaccaataaatgcaatctttgatactttgatttgtatttgtgctattattggggcacagcttgtttatgcatcaggatttgtttatcgtaaggatattcaatatatgttatcacaggaacgacgtactgaagttaaggataatcggattatccaattgcctacatttctttattggtttatttatttgtttggtttgataattttattgacttctccttattcatcaacatcagctttatttccttgttgtattggtgttttaggaattggtgggatgcttaaatattgtttacctaattggttaaaaaaatggaaagataaacgttatttaactcatcctttaaaattaatatcactttctaatttgttgtattctttgcaacattcaattttattaataggaatttatggcgtttcaacgagtgttatgattgctatcatgatttctcaacaagataatcctcgagaaatgattacagcaattgttgggtatattgttgttatgttattgttattagcgagtattctttataaatattcaatggaagcaatgacgcgtaaaatgttttattataatttatataaacttggttattcttatcatcaattgcttgatattattaagcaggaagtgagctattattatagtgtgcttgtgggactaccatttctatatattattgtcgctttgattcaagcatttattcatcaaggtataacgttagaatttatgataactgttattttagctcaaattttatcagcttttttagctgcgattgtcacttatatatcttatagaaattcagtattgaaagttttgaaggaaggtgttcgttatgagtaaggaaatcttagttgctgatcatgtaactaaagtatatggaattgaaacaaaaaatccagtgactgcattgtctgatgtttctttgacaatgtatgagggtgattttatttgtgttatgggaccatctggttctggtaaatcaacctttattaataatttatcgacgattgatgtacctactaaggggaaagtctttattaatggaaaagaagtaaggacaatgggagaaaatgaagttggtcgttttcgttatgaaaatttaggattcatttttcaggaatttaatcttttagactctttaacaatctttgaaaatattgctgttcctctttcattatcaaatatttcttcggatgaaattaaagaacgtattttaacagtggctaaaagattaaatgtagaatttttattagaaaaatatccttatgaatgttctggtggtcaaagacaaagagcagcaattgcaagagcacttgttacaaagcctaaactaattgttgctgatgaaccaacaggtaatttagatagtgctcattcacatgaacttttagagttgtttaaaagcctaaatgataatgatggggtatctattttaatggttactcatgattcgatgattgctagctattcacaaaaactcttgtacattaaagatgggaagatagcggaaacaatagaacgaggagatttatcacaaaaagagtatttttataaaattgttgatgtcaattctgttgaatcacaaaaattatttgtggattaaggtttaaacatgatgtttaaatcttttttataaagctaaaatttgcttattgtaaatatagatgatgtgtgttaaaatttttttgaaaaagttgaaaataaaaaagaaaaatgagactttcctagcgtatatataagtaggagggttaatttatgagtgaaaaaaattattatgtatcagatgtcttttttaaactgacctttggtcaaaataccagtgaatccaagcggttaagagaatttcttttgaaaaatatcattccccttgtcccgattcacgatttaagtgtggcgaatccagaactaacacctcagatgattcgtatgaaaaacaatatcttggatattcatatgcaaaacaaccaatatgaaattgatatggaaatgcagaattccaagatgagcgtctttctcaatagacgcttcatacattattcctgtcgtctgattgactatcagctggaagcaggagacacatcaggaaaactgaaggaactgattcagattgtgttcatcagagatattgataagcgctgtccaagactgatggatgatttctatgccaaaaatacatacaatatttctcagctgggatatctgcagacaacaatctatgtctatcttccttatgtcaataaaatagccagtgaaaaagaatgtctaagtgaatttgaagcattgatttatttaatggagaatgggaatgtagaaggaatcaaatatgaagaaaaggaagggatgattaagatgatgaagaagaaatacaacaagtttacaaaggataagaagatggtgaaggaagtggatgcaagatatcaggtacagtatgattttcaggagtggcatgatgtagatgtagaatatgccaagaaggctggattggaagaaggacttctagtaggaaagaaagctggattagaagaaggacttctagtaggaaagaaagttggattggagcgaggactactgaaaggactatcagaaggaaagttagaaattgcaaagcgacaatatgagatgaaataccatcaagatggagagtggctaaaggaatgcacgcaagaacaattagattattttagtcaattgatattaacagatatagaatcaagtgaacttaaagagaagatcatgaatttagtatcctgaagaaaggtgatgatgtcgtcgtgaagtttatcaaggataagaagaaggtaaaggaagtggatgcaagatatcaggtgcagtatgattttcaggagtggcatgatgtagatgtagaatatgccaagaaggctggattagaagaaggacttcgagtaggaaagaaagttggattggaacaaggattggagcaaggactattgaaaggactattagaaggtaagctagaaatagcaaagcgacaatatgagatgaaataccatcaagatggagagtggttaaaggaatgtagtccagaacaacttgatatatttattcaatttattttgacagatattggatataaggaattaaaagaaaaagtcttgtcatttttataagtctagaataattttgaaatgtttataaacgaaaaggagaaaatgagttactgaattgcaattcaataactccatattctctttttgtttttattaaaaaaataagaatacaacatcctttttgatgaaatatgtaatgattggtgtttgaaagtaaaagagtatgtgcatacttgtagtgatttagaatatttaaatggtttgttttcacttaaaaatcgttatataatagaaaaatcaaggaggaaataaaatggtagatttagaaatgttgaaaaatataagtttagttaatggaatttctggatttgaaaaacaagcaacacgtgttatgaaatcttatattgaagattgtgttgatgaaatagaatatgataatttaggaagtctaattggaataaaaaaaggaactggtcaactaaaagttttattgacaggtcacattgatgaaattggttttttagttaaagatattgatgaacaaggttttattcatgttataccagtgggaggatggatgggacagaacttaccatcttcattagtagttattacaacaagagaaggaaatgaaattaaaggcgtttttggttcaatggcaccacatggcaaaactgctgaggaaatgaataaagtgactgcacctcaagatgcttttattgatgtcggggttttgaataaacaagaagctattgatttaggaattcgtaaaggtgatccaattacaccagtttcagaatttacagttatgggtaataaaaaatgtttgatgtcaaaggcttgggataatcgtattggtgcagcagtcataattgaagtattcagacaattaaaagacgaaagtatttatccaacgctttatggagcaggaacagttcaagaagaagtgggattgcgtggcgctaaaacagtaggacaaatggttaaaccagatattgcgattgctattgatgtaacattttcacaagatattcctggtgataaaggtgatgtgaaattaggcacaggtgttgcgttaggtgtgatggacggaagtgccattgcgcatacaggtttattaaaagcattagaggcgatatgtcaagaaaatcaaataccttatcaatatgatatgacaagcgtaggaggaactgattctggtgaattaagcaaggttgatgctggagttatgaatattacgctttctattccatctcgttatatgcattcacatcgtacaattatccatactgatgattttcaggcaactgttgatttaattgtttcctttataaaagcaatggatcaatcattgatgacacagatgatagaggataaaagataatgggagcactcatattagaaggtggaacttttcgaccaatattttcaagcggggtcatggatgctttgattgaccaaggcatcgaattcccctatgttattggggtttcagccggaataacagatggattttcttatgtgtctaaacaaagaaaacgtaattatgatattttaatgaatcatcgtcatgataaacgttatgtaggaatgcgtaattatttaactgataaaagtttgtttgggttaaagtttgcttatgaaacaatcccgaatgaactttacccttttgattgggagacatttttaaatagtccaacaactattaaagttggggtgacaaatgttgagacaggtgaatgcgaatatctagatggtaaacaattggataaacagtgtacaatgctgaaggcaacatgtgctataccatttgcttttccagttatacatattaatggaaaagggtattatgatggaggaatctgtgatcctattccagttagaaaagctatggaagatggtcatgataaaatgcttattgtcttgacaagaccaaaaggatatcaaaagacattatcaaaagcgaacgttgtggcagctcgtcatttaaaaaagaagtatcctagattagttgaaccattattgacacgacatgaactttataatgaaacagttcaatattgtgaacaattagaaaaagatggaaaggcattgattttacgtccaacatcagaagtacaaattgattcatttgaaaaagatttacaaaagatagaaagaatttatcaatttggatatcaagaagctataaaacatattgatgaaattaaaacattattaaaatagatatttttttgacattttcacacacttttaaaatattcttttgtcatttatataatatgataataactataaaaagagcaatgaatatatgttgcagaaaggaagatccaaatgaaaaaaatgaataaaaatacattatttaaaatgcttgttgttgttttacttattgtatcattaagttgtaatggattcttactctataaagtcctaggttcaacaacatcaaacacatcaacaaattcaaatgctaaaattgagacagttaattatgatgtaaaaacagatttaaccaaagttatcgcttcagctaaagaatccacagtcggagttgctgtttatcaaggaaataaattatctggtagtggaagtggcgtgatttataaaacagatggtaagactgtttatattattactaatcatcacgttattgatggtgcacaatctattgaggttatctattcgaatggaaaatcagtcaaagctaacctaattggtagtgataaatatggtgatatcgcagtattaaaaatgacagtagattttgatgtcaaagcctttaagacaggagattcagaattattagaagctggggaaccagttcttgcagttggaagtccattaggaattgaatatgcgggaacagtgactcaaggaattgtttcggcaccaaaacgtacagtttcagttgatttgaataatgatggtaaagaagattgggatatgaatgttattcaaacagatgcagctatcaatccaggaaatagtggaggtgcattggttaatgcagctggtgagcttgttggtattacatctatgaaatattcttctgaatcagttgaaggaatgggatttgcattaccaattaatgatgccgttaaacttgttgaagaaattatttcaacaggaaaagttaatcgtccaacattaggtatttctggagtttcattggatggatattcatcatatgaattatatatgtatcgtattcaaacaaatttaaataaaggaatttatattgcgggagtacaaagtggttctgcagctagcaatgcaggcattgaagttggcgatgtcattaccaaatttgataatgaagaaattacttcatacaaggatttcttgacaaaactttattccaaaaaaccaggagatagtgtaaaattaacgataaatcgtaatggttctacatctacacttacagtgaaacttggttcttcataaggaaagacgaaaggtctttctttttttttagaaaaaatatataatgaaggcggtgatattatgaataaagaattaaaaagacaattaattttatcaggaattctcgtatgttttattatttcaacattgtttttatggtataacaattttatgtttcatacttatgttaataccgatgattatcaatattgttttgctggtggaaatgaagaactttctattgatggatatcagttctacaaaaataaagaaggacaaaaacatggtaatgcaagaattatagcattaaaagatcaatttttattaaaagatgattctatccatgtgattgttacatctttaaaagataaagatttggtttttgaacatgaattatctgttaaaggagataatgaagtattaactttgagtgaagatgaaactaaagaaaaattatcagaaaatgatttgacacaattatcagtgcaaattatcattaaacgacaaaacaaaacagtttatgatcaaacagtgcctttacaaaaacaagatgtttatacatataatggggcgaataaagattacgctatttctaatgtgtatgtcacttcttcatggctaaaaacaggtgatttttcttcaaagattaaaaatattgaaaaacaatatccatatatgattattgattatttatatcttaaagataatggtcaacaagataatattaatgattatgaaagatttgcttatataaaaggaaaaacagctgatattttgaaaaatactaatcgaattagtgtatattatgatgaacaaggtagtttgttagatagacctattaattgtgttgtgacattaatgaaagatgataaacaacaaaaaggatacacatttatgttagaattgcatggttcattaaaggtggtggatgatcatgagtaaagcaagaaaagatatgataacaatttatatgtttagaaatgctttagccacattgtttgcagcttttgcttcatttatgatttcattgattcattattatcaatgtacttttgctgaagctttacaaagattatttgtttttgatatttatacaacattatatttcttgctcatatggctgtttgattatttaatttttgaaatttcaaagattatttatgatatttatgaagaaaaagtcactttcttgccatgtattgctttactggctttatgtggagttattttctttattcctatcttagacttatttcagtatgatttatgtatattgtttctattgatttgtttaagaatggtgaaagaaatgtggaaaagaacaccagaattatttaaatgggcacatcgtttggttgatcaaagaaaaaagagaccagaatctggtctaaagtaattttgaaagattttgcaagaattgcatttgagaagaagcgtctagtgagttatagtattcttcaaaaagaacacctaatccaactaagattgtttcttcttttgatgctataccatcatctatcgtttgtttaagctgactagctgaaaagccttttaagttcattaataatgcctcgcgcatattatcaccctttcttatataatatgggtgattttcacatgtttattcaaggagttttatgaaaagttatcaaattatgtttaatcaagaactcatttcttatgatgtttattttaagaatatgaagtcaattcggataagagtgaaagaaggtcgtattcaagtgagtgcaccttattatacaccaatttcttttattgaagaaaatttatataaatatcaagataaattattgcctcaattaaaaaaatatattccttatgcaatttatcaaaatcaaggttatgttatgatttatgaaaagaaatatactctctcagtgagagatgtacaaataatgaaatgtcaaattcatgaagatgttttgtatgtctatcattctcgtatacaagattgtgtagaaatgtatttgaaaaaaatattgatggattatcttcaagaaaagattattgaatatttggcatatgattttgatttagatatgcctttgatagaaattaaaaaatataaaggtcgatggggaagttgtttttataaagataataaagtaacttttaatttatcattaatacatttgccgaaagatttaattgattatgttattgtgcatgagttagcacattttttacaagccaatcattcccatttattttatcaggaaattgaaaagagaatgccagattataaacaaagacaaaaaagattgaaggagattcatatatgattacatcattacaaaatgaaaccataaaagaaattatgaaattcaaacagaaaaaatatcgtgatgaaaaagacttatttttagtcgaaggatatcatttggttgaggaagctagaaaagccaattgtattcaaatgcttattacaactttagaggagaaatttgtagaaaaaacgctttatgtttctgataaagtcatggaaaagttagcttttacaaaaagtcctcaacctattatggctatctgttataaaaataaaaatcaggaattattaaaagcagggaaaagatatttgttgttggatggattgcaagatccaggaaacgttggcacaattatgcgtacagccctagcttttggatatgatcaaatcattatgtcaaaggattgtgctgatttatacaatgataaagttattcgttcaacacagggggctttgtttcaaatgaatacatgtatcatggatttaaaagaagccattacttttttaaaacaacaagggattaaagtctatggaacatgtttacaaaatgcacaaagtattgatcaacatcaaacatacagtcaaatggcttttgttatgggaaatgaaggacagggggttcatcaggaaattttagatttatgtgatgaacgcttgtatattccgattcaatctattgaatctttgaatgtagccattgctgctgcaattacaatgtatcattttaaggagatgaattaatggacttaacgcatgatcaaatttgtcaggatatgattcattcatctattcaagatataaaagattttcgtcgtaaaacaaaatttatatgcattttattagctcttttatgtgtttttatattttctaaaacagatatcaatatatttggtttttcatttcattataatttaggattaggatggataggtctcatcatagcttttgtcctcgttatatttatcataataggatataatgtttgcttatctttccatgaattaactgtttctaatcatatattatcgcttgtcaatgaaaaatgtgatcctttacgcgccaattatgtttatacacaattgataaaacaaaaagttttaaatgaagaaaatatatgtatggatctcatatcggtcttacaattacaaaatcatcaggaaagaattcgagatttgttaaatcaatatccaaatgctggaacaaaaaataatcatcggattgttgctgaatttgaattgcttagtgaagaagaaaaaataaaaaggcatgaggagttttatcaacaaaatattgccatcattgaaagtatgcaattgaaaaataaaaaagctgattcgaaaagttttgaacttgttaaaaaaagtcacttagcacaatatttaatgtatcaaaaagattatttaaaggcgattgaactccttcaggaattagcttcattatcacctgtttatcaagttatatcagccttaaaaatgggaaaatgttacatggcattaaatgacaatgaacgagcaataaagaattttgaatatgttataaatcatggaaatacaatgtatgcggttattgaagcaaaagaattgatgaaaaaattggaggaaaagaaagatgagtgttgatattgttattaaacaaaaagggttttttaaaaagaaattatcattaaaagatattttaatgaatcattttgcttatggatgttatgatgataattatattttaaaacctaatgaatgtgatgaaaatgaagttattctttataatcctaaccatattgctagagggataagtgtggtatggaatgaagctgaaactaatcaaatcgggttacatatgctgttaccaacaacttgtgaagaaattgatgatttttatatgttaattgagcatctttgtcgtttatggaaaaccgatagttttgaacaagatggagagattcattcgataaaagaaattgaaaacatcaaatcagggttaaaggattttaactatgatacgatgaaaagttttttaactgaacatgaaaatggaaatttcttttgtgcaatgtggccctattactttaactcaaaagatgttatgaattggttagatgatcatgaattatctcatttttctaaagatatccataataatcaagtgattgatttatattattgtgctccgcgttattatcgaatgaaagatgaacaaattttaggtgtgtatacaatcactgcaactgttgatactgtttttccaactgaacctttaacaccattttcttgtgtgaattttcaaacgggtgaaagtataactgctaatcaaaatattgtggctttttattctttagaaaaagaagaaattctaggagatgttccatttgatgattttatgagtgaaatttctaaaaaagaattacatgaatttgatgcgttgcatttttattttgatggtttaagtgaagaagaaatagaaagtctcaatcagaaatttccatcaaggatggggtaaaacgattgaaaatgaaaaaagacttgtttttatgtgtaagattggctataatatgaaaagtaaacacgatgaaaaggacaagtaggtaaagaatttgttaaagagaggaaaacaaatgctgtgagttttctaacaatgcatttattgaattcaccttggagtgcgactaatcatcgccgtattcacaacgttactgtgatcaaagtgcataacagatgaatgttatgaattaggatggtaccgcgattataatcgttcctatatggagcgatttttttatttgaaggaggaaattatggacgaattattacaaattaaagatgaagccctaacaaagattcatgattgtacatctttaaaagatttgaatgatttaagggtattctatttagggaaaaaaggaccaatgcaagctgctatgaaatctatgaaagatatgtctaaggatgaaagagcggcatttggacaagtttctaataaagtgaaacaagacattacacaagctattgaagataagaaagtggctttagaagaagctgaaatgaatgcgaaacttgcaagtgaaaatattgatattactttacctagtactgctttaccattaggaagtttacatccattatcagtggtaaaaaatgatattgaagaattattcttaggtatgggatatcaagtagctgaaggacctgaagtggaaagtgatcattataactttgagttaatgaacttaccaaaaggacatcctgcaagagatatgcaagatactttctatattgatgaaaatactttgatgagaacacatacttcaccagttcaagcacatgcgatgattgcggcgcaaggaaaaggacctatcaaagtcatttgtcctggaaaaacatatcgtcgtgatgatgacgatgcaacacattcacatcaatttatgcaatgtgaaggattggttgttgataaaaatattacaatggctgatttaaaaggaactttagaagtttttgctaaaaaaatgtttggggaaaaacgtaagattcgtttaagaccatcttatttcccatttactgaaccaagtgtggaagtagatatcagctgccataactgtgaaggaaaaggttgtccaatgtgtaaacatacaggatggattgaaattttaggggctggtatggttaacccaaaagtgcttgaaatgtgtggctttgatccagaagtttatcaaggatttgcctttggaattgggttagaacgtgtggccatgttaaaatacaacattgataatattagagatttttataatgatgatttaagattcttaaatcaatttgggagaaaggggtaagccaatggaagcgagtttaaaattattaaatgaatatgtcgatattagtgatcaagatcctgctgctcttgcagaaaagattacacgtattggattagaagtggaaggaatgcatgaacttgcacatggtgataaattagttgttggttatgttaaagaatgttatcctcatcctgatagtgatcatttaaatgtctgtcaagtggaagtgaaacctggagaggttactcaaattgtttgtggagcaccaaatgttgctgctggacaaaaagttattgttgccttacctggatgtaatttaggtgagggatttaagattaaagaaggtcaaatccgtggtgaagcatcaaatggaatgatttgttcaattgctgaacttggattagatgcacgtcttttaaaagaagaagataaagcgggaattcatgttttagatgatgaagcaccaattggtgaagaagcattatcttatatgggattaaaagatgtcattttagaaattggtttaacaccaaatcgtagtgattgtatggcaatgacttctttggcttatgaagtagctgcggttttaaatcgtcaagtgaaattaccagaagttaaaaaatataatgaattagaaagtgatatcaaggttgttgtagaaactgatttatgtccattctttggagcgaaattagtcaaaggtgttcaaacaaaagaatcacctgcttggttaaaaaatcatttattagctagtggaattaaacctattaacaatattgttgatatttctaactatgtgatgttagaaacaggacaacctattcatatgtatgattatgacaaattaaaagaaaaaacatttgtcattaaaactggtttccatcaaaaagctgtgcttttagatgaaaaagaatatgaattattaccagaagatattattgtttcaacagataatgggattggttgtgttgcaggtgttatgggtggtaatgatacaaagattgatgatcatactaaaaatattgttattgaagtggcaacttttgatggtccaactttaagaaataccgcacgtcgtatgaatttattaacagatgcttctcaacactatatcaaaggagctttaaatactgctaatagtttacatgttttagatcgttgtgctgatttattagtacaagaagctgacgcaagtgaaatttataagagtgtttcaactgatttgaatgttgaagaaaagaaagtcactgttagtcaagaaaaaatcaatggtttattaggtatgaatattactgttgatgaaatcaaagacatctttgatcgtttaagttttacttatacattaaaagacacaacatttgaagttgttgttccaacatatcgtaatgatataacaatggctgctgatttaattgaagaagttgcaagaatgtatggttatgacaatatcccttcatcattaccattaatggaaatgacaaaaggaaatttaacaccaaaacaaagtaatgaaagatttgtaagagatgttcttgttgatttaggattacatgaaacattaacatatacactgacttcaccttcaacagtcaatgattttaacttattccatccattagatgaacaagtgaaattaatgtctcccctaggagaagaaagaagtgtgacaagaaaatcagtcatcccttcattattacaagtgattaattataatcaatcacatgcatgtaaagatgtttgtatctttgaaatttctaacacttatgccaaagatgaaatcacaactttagcgattgcatgtaatggaacttatcatagtgtaccttgggcaggcattcatcgtaaagttgatttctatgttgtgaaaggctttgttgaaactttatttaaaaaattatgtattgaagaatcacgttatagcttagtaagagttgaagctgataacaaagatttccatccgggtagaagtggttatatcaagatgggaaaagagattgttggggttattggacaaatccatcctttaaaagctaagaaatatgatattaaaggagaaacagttgttgctgaattgaatttatcagttctattaaacttaaagacaaaagcgttaaaagttgcagctattccacaatatccttctgtcaatagagatattgcacttgttatggataaagatattccaacatatgatgttgtgcgttctattcaaaaagctagtaaacgtttgatttcaaaaactgagatctttgatatttatgaaggagaacatattgaagaaggaaagaaatcagttgctattacgctaactttccaagatcctacaaagacattagaagatgctataattaatgaagttatggaaaatattcttgctgtcgttgcgaaagaatataatgctcatttgcgtgcataataaaagagacattgtctctttttctttacaataacaaatggagaatttatggatagaaagaaattaaatttaaaacaaatcttattattagttactggtatgattatcattgcaattctttgttttatttattatcaaagacaacatattcatttaaaaaatcaaggtgtttatactcttgaagtaggaacaaaacttgattttcaggcaaaggattattttgatttaaacttttttacttcagctgaaagagaaaaaatcaatcaaaaaataaaagttaactttcaggatttaacttatcttgatcaacaaaaagaatttattaatataggtaaatatcaaggggctattagttatcaaaataaaacttattctataaaattaattgttcaagatacaacgccaccagaaatagaatatgatgataaaattgcttatcaacaagctgactttgacattaatcaatatattcaggtcacagataattccacaggaaaatgtcaaaccgatattcaaactcaaaatttagatatcaatcaattaggtgagtatacaattacagtgaaggcaagtgatgcatctggtaatcaagttacacaaaatatcaagatgcacgttgttgataaggaagccccagttttaagctgtgttgaagataagattcttcaaattggggaaagttttttacctttaaaagatgtgagtgcgaaagataatgttgatggtaatataaccaatcaaattcaagtcaagggtcaggtggatactaataaaaaaggaatttatactgttttatatagtgttcaagatcaagccaaaaatcaaactcaaaaagagcgacaaatctatgtgattgattcatcttatttaatcaaagaggttccaatgattttacagaatcctggttattataatggttgtgaagcagcaagttcaacaatgcttttacaatattatggttatcattataaaatggctgaagttgttaaaagtattccaacgattcctttgcaaagacataatggtcgtctttatggagctaaccctcatgaagcttttacaggaagtatggttcatgagggatatggtatttatgcgaagccaatgatggatgttgtgaatcgcttgatttcaaagaaagaaggaaaacatcaggtcagaagtttgataggtgaaagtgttgaaaaactcctttatgaagtaagcgaaggtcatcctgtacaaatctgggcaacagcctcaatgatgaacgtgaaatactcaggcacaaaaagttggtatattaaaacaagagctggaaagtataccgatgagcaatatcattttccactttctgaacattgcatgttattggtgggatatgataaaaacaatgtcattatcaatgacccattaagaggacaagttcgttatagcattaaggcttttcgtgaagcttttgaaagtatgggagcacaagctttgatgattgaaaataaagaatagtaaaaaaggaagatttttgtgatcttcctttttattctacagtggcataatctttgtttttaattcgtttataaacttgtaaagtcgttgaagaaatcaagattgctagagctaatgaaatgccaattcctaaagtagatagaaaactttccataaataaatcattcatcccttgtaccgcataaagcattgtgtaatagataccacttccgggaactaatgggaaacaaccaacaataataaaaatagtcgcaggggctttatagattcttgccatcatttcagcaagtaaagcgacacatagcatagcaatgaaactttgtagaaagatattgtgtagaaatcttgtggctaaataaatgatccaacctaaagtacccacgagtgaaccaacaaaagcaaatttcatgtttttatgaattctaaagataaaagtaaatccaaaacacccaacaaaggccgataaacattgaataaattcttccatttttatgctcccttcaataacatcatcatgaccccaactccaattgcaatactggctgcaatcaagatagcttcaatcatgcgtgataagccactcacaaaatccccaccaataatatctcttaaactattcgtaatcgcaattcctggaaccagcaacattaaagtcccagtaatgacagattgttgatcattgatgatatttattttatgagcaataatcgcaatactagcaagaaccatacttgataaaatcgttcttacaattgtattcatatttaataattccatcaaataaataaaataatataaaacaaaaccaataattgccgatacaatcatttcattaaatccaccaccaaagaatacacaaaacatggcagctgaaacaatataaccaattaaaatcaattgaaaattaagtttttgatgtttaatatagtgaatcttttgattgatttgttctaaagataattcttgattactgatttgacgaacaagacaatttaattcataaagatgatcgagatggatacgatttgtacgagaacgtttagaagaatgataaggagttccgtcatgtaaagttaatgataatgtaaaataagaaggtattgcaaaaacttcaacatcatgaaaacccaagccttcacacattctttgtatggattcttcaacacgatagatttcagcaccatgttttaataataaataaccaatttcattaatggctgttaatgtttctaaatcattcataattttacctcgcaataaacatatataccatataatataacgtaagaatggataaagataaagaattttttctgattttgtaaaaccttttatttcaaagaaaatgtggtacaatatgataattataaggggtggggttgatgattaaattaattgtaagtgatttagatggaacactattaaaatatgataatgaatttgattatgagagttatcaaaaaattaaagaattagagaaaaaaggtgttgaattgatgtttgcaactgggagagattattggatggtagaggatatttgtcaaaagtatgacatctataatcctatgattttaaataatggaactcagtatcgaacatataatggagaagtgaaccattattatccaatggaaagagatgcttttgaaaaagtcatgaatattttaatgagttatcattatcatatttcagttcatacccaaaaaggaaaatatatttttgaggatattgaaaagtatttttctagacatgttgaacttttaaagaaagctcgtggagtggatgatgagtctcagttacctaaggcagctttttttactcgagaaggatatttgaaaaatgttcatgaagtgcaatctattgatgatttatattttcaaggtgctttaccactaaagattgatgcaagacatattgatgcaaagtatgtttctaatgttagacatttgtttgatgatattgaacatcttcatatttcatcttcttttggtgagaatattgagattacaagtgatattcatgataaaggaagtatgttaaaagaagtactcaaacaaagaggattatcaattgaggaagttgctacttttggagatggattgaatgatatcagtttacttgattttccttattcatttgcgccagggaatgcagtccaagaagctaaacaaaaagcaacttactcactgaataaaacttgtgagcaaggtgctgttaaaaaaggtcttgaaattttagaaaaacttaatttgctttaatataaggaatatgggcatattccttttttattattttttcactatcctttgataatagagaaagtaatttggtcgctttgatttcaatatctaaagcagggtgagagaactttgaaagattagtaacaatctgataggaacatgtttttttaatcaatgataaataatgccttccttgatcattcatagctaggatacgtagataatcgatatccattgcttgttttatttcatctttttgattattcattaaaacgtgaataatcatgcgttggatgcgtggaagggtataacgtttagaaagtaaacgattgataaattcttccattgaatgactatgagtaatggcatgaagcatggtattctctaatccttcgtcaaccaaatgaatgtgtttgagttcttctttggttgttgttaaaagacggtattttaaataaggaaaatagtctttaagaaaatagcattcattttgatagagttcaggatgtggtaatgcttcttgataatcctggtgtttggcaattgcttgacggattgacgtagcactggcgatttgttgtaagtgagtatcgtgataatcattggtacgtttaaagcaatggggagtgattggatagtgatggctaatgatttctttgacatagcttaatcctaataaatcattgggagtacgaacttctttatgcataatttgaatgagtgcttgattacaggcatcaggataacgaagtccttccttcattgcttttttgacataacaatcatatagttcttgatgagcatgaatagcattggcaatatcgataaatgtttcaatatgtccatcttcacttccaaaacacaaatcagtgataccaatagcgtgtaataaatcaattgctcccttagcaaaataatcagcactttgacaactataaacaaaaggaagttcaataactaaatcaaccccaaattcaatagctaaatgactacgtgtccatttatcaataattgctggttcacctctttgaacaaatgaagatgacataacagcaattgtataatcaggcttcacaatttgttttgctttttgaatatgatagatatgtccattatgaaatggattgtattcaacaacaattcctagtactttcatgtaatcacctcttgtgttagtttaccatagttttgttattatgaatagttttgatgaaaagaagtgaaatattcattgaaaattgtaaaattcgattgacatatttaagagttttatatataattggctatgcggtgtaaagggtgatttttttgaagtggaatttacaatggatagtaaaacaaaaagatggttgttttgatttcgacgaaacgctaagttttccgtctgagatgttccacaacttatctcaaatcaatggtttgaaagatgtacatgtgactgggcatggaagcttggacacgaaaaatcgtcagttatacgttgattttaaagtcaaaggtcaaatgattctaccatgtgccgtatcattagaagatgtggattatccatttgaaattgattcgactgctatctttgctttctataaaccgcaagatgatgaagatgtcatcgaagtgaagcgagatactgttgaattgacaccagtgattttccaagaaatcatgatggatgtcccaatgcgcgtcgtcaaggatggtgcaactttgaaaaccaaaggcaatggttggaaagtattaaacgaagaggacgaacgtgaggatgaggattatatagatcctcgcttagcgaaacttaaagattattttaaggataaagaataaggaggtgtacctatggcagtaccacaaagaagagtttcaaaaacgagaagaaacaaaagaagaacacatgacaaattaacagtaccagctgtagttgtttgccctgaatgtggagaatacaaattatctcatagagtatgcaaacattgcggaacttacaacggacaaaaagtgttataaaaactgccccttattcaagggctttttttatttgtattggaaaacgcttaatatacatatttgtgtatattgagcgttttttgtattatagatttatttttcattagtgaaagcatagatactcatgagactttctttatcattggttattgtatagttatcttcatttttaaagatatatcttgattttaaacttaaatctttattaatggtatagagaaaagtaaatattcaagcatatcattaaacaaatcatattttttttatgctttgttcaattttgtggttttctttagttttgatatcgtcaatataaagtttattattttctgataattgaattttagattcaatagaaacaatatagtatcaaggttagtattgggcggagctttaatcattactttcttttatggatgataaaaagtaaatattatgaattgaaagagattaactctgtaaatttatcgctatttttataaaaatattttttgaaagggataatcgagaagtatagaatagtaaaacaaaaataaaacgctctttatttttattgctagctttgatatgatatagacagaagtgagggcaagaatatgggagaaaaaaaacattcgattttgaaaaaagttttaatattaatatttagtgctgttattggtataacaattggtgttgttggaatcagttattggaatgatgttcaattagaaacacaaaatgatttaattgatgaaatttatgctaaggataaacattatcaatattattattcaaaactgaatgcaaaagataaagatacttataaacgtatgtattttgcaatggcaacttttaaggatgaaattgatgtcaaagaaacaaatacagaacagattacggtaattttaaattatatatttaatgatcatccagaattatattatatcgatggtgaatatgaatatgtcaaagaaacagatacgctaactttctatccacgttttgtgatgaacaaaaatgaagttgaatcaaaaaattcacaacttaaagaaataactgctgaagtcgttgaaaaagctaagagtcaaaaagatgacttgacaaaggcaaaagtgatttatgattatattattgaaaatacgaaatatgttgaacgaaaaggaaaggaccaagatgttattggggcattgttagaacatgaaacagtgtgtgcaggatatgcgcgcgcttaccaattattaatgaatcaagtaggggttccatgtagttatattgttggtgattcaaaaattgaaacagaaaatagcccaggttatgaagggcatgcatggaatatggttaaaataaatgatgactattattattgtgatcctacttggggtgatgatgcaaataaatatggtgcacatacatgttatgcatattttatgatggatagtgatgatatgttacgttgttatacaactgatgatttttatgaaaaaacaaaaaatccttcagtaagctattttaaagataatcatatttatatggaaagctataatgaaaatatcgttagtaatgcgattcaattagggttaaaaaataaaagtcgtgtggctgaagtgaagtgtggaagtcaaagtgtgtataatcgtttgaaaaaaagattaacaaaagattatttagcttatgaacaacttaagaaaaacggttgttggagtgataatacaagatatgcatgtttagatgagttgaaagtgattgaattgtattattaattgataaatattggaaaaagagtgttaagtggctagaaatagtcactttttttgtgcataaaataaaaaaatggagcacgatttttatatacaagatttctttcttggtatataatggtggtatgaagtgttaaaagatgtataaaaatgttaagaagtgggtgattttgaatgttctttggtgaatttaggcacaacattgatgcaaagggaaggctaagtattcctgctaaaatgcgtaatcaatgcggtgaatgtgtatatgtaacacgtggaaatgatggttgtttagcattatatacacaacaaggatgggaaaaatattatgaagaacttcaagctttgccacagaaaaagaaaagtacccgtatttttatccgtttagtcacttcaagagcaagcgaatgtgaatttgataagttaggaagaattaatattcctcttgttttaagacaagaaggtcatttagaaaaagaatgtgtcattgttggtgttggtgatcatgtggaaatatggaatagtgaagcatgggatcaattctatgatgataataaagatagttttgatgaaatttcagaagatttagatgaatatgaattgtaaaggagagcgttatgtttaatcatgtgagtgttttattgaacgaaacaattgatggattaaatattaaagaagatgggatttatgttgattgtacccttggtggtggaggacatagccaggagattttaaaacgattaacatcaggtcatctttattgttttgatcaagatcaagttgcgattgaagcggctagtcagcgtttaagccaaatttcagatcactttacaattatttattcaaattttaagaatataaaaagtgaacttgcaaaattaggggtttataaagttgatgggattgttttcgatttaggtgtttcttcacctcagtttgatgatggagatagaggctttagttataactatgatgcaaaattagatatgcgtatggatcgaaatcaagcatttagtgcatatgaattagtgaatacatatgagtatcaagatattgttaagattttatataaatatgctgatgagaaatttgctaaacaaattgcaagagccattgaaagacatcgtcaagaaaagccaattgaaacaacttttgaacttgtggatattattaaggaagctattcctgctccagcaagacgaaaaggtggtcatcctgcgaaaagaacatttcaagcattgagaattgctgtgaatgatgaattaaatgtttttgaaaaggcattagatgatgctttggatttattaaatgttcatggacgtgttgcggtgattactttccattcattagaagataagatttgtaaatatacatttcaagaagtgacgaagcaacctgatttaccaatgggaatgccaattgttcctgattatttaaaaccaagatttcaaaaaataacaagaaaaccaattgttgcgagtgaagaagaattgaatgaaaatcatcgttcgcattcagctaaattaagaattatagaaaggatatatgaggatgaagaaaaataagaaaaaagaaacaagatttgtcagattttcaagacgtctgtttatgtttagttttgctgtatttgtattaggtattgtcgcattaaattcatatgaatcaacattgaatattcattgtgcaaaattagaaaaacaaattgcatcaattgaatcagatattgatggtttagatatgaagaaattagaattagcttcattttcacgtatcgaatctattgctgaagaaaagggatataaatataaacaaagtaccgcaactgctgcagttgttggagtacctagagagtaatgacaatgaaaaagaatagtaatcaaagtgcaaagattgtattatgcatcattgcacttgttgttgttgcattggtatttaatgtcgtgtttttgggagtaacaggaaagcatcttgttagcggcaatgatatcaaagattatgctaaaaatcgtggtggtgggcaaaaggtagaaactttgcaagccaagcgtggaacaatttattcgagtgataatgaagtcatcgcaagtgacgtgaaaaaatataagttatatgcggttttgtcaaagacgcgtttaacagcggataaaaaaccagcttatgttgttgataaaaaagaaacggctaaaaaattagctcctattattaaaatggatgaagataagattttagagcgtttaaataaggatacttatcaagttgagtttggaagttatggaaataatctttcagctttggttaaagataagattgatgcattgaatttaccaggtttagagtttactgaattaacatcaagaaattatcgttatggtgattttgcttcttatgaagttgggtatgctcaggttttaactgaagaactagaaagtaaaacaactcaatctattgttggtcaaatgggaattgaaaaaacttataatgatgagttgactggaaccaatggtcaaaagatttatttggctgataataataattatattttacctaatggaattattagtgaaacagctcctgttgctggaaatgatgtttatttgacaattgatactgatattcaaacagaaatggatttacaaatgaaaaagcttgttgaagcacaaaaagccgataaagcaacatgtgcaattatggaagccaagacaggaagaatattagcagttacaaattatccatcatttgatcctaataagcgagatatgaaaaattatgtagacttatttttaaatgaagctgttgaaccaggttctgttttcaaagcttttgtgtatgcaaatgctttaaatgatggacgtttaaatcttaagagtacttatccatctggtaagtttgtttatgataaaaaactaaaacctattggagattggaatgatgctcaaggatggggaacaatcagttatgaaaaaggtttctattattcaagtaatacagcaatttgtaatatgttaacgaagattacagacaaagagtctttattacaggattatgaagatttaggcttctttaaagctggtgaggttgacggtctacctacaggttctggggttgctggttataagaataatgacggaagactggttgaatatttaaccactggatatggtcaaggatcaaccttcactgggttacaattaatgcgaggttatagtgcatttgctaatgatgggaaaatggttgaaccctatcttgtcgaaaaagttgtgaatagtgaaacaaaagaaaatgtttatcaagccaaaacgcaatattcaaaacagatttattcaacaagtactgtgaagaaaatgcgtgatttgttaagcggagttatcaatttaaaaggaagtactggatatccttatcatatggatgatattcgtttgattgggaaaactgggactggacaggttgctaaggatggaagatatcgttctaattactatacaaacagttttgttggtttagcaccttatgatgatcctgaagttgttattgtgttatggtatcaaagttatgctggtagtgctgttaattcagcgaaagttgttaatggtgttgtgcgtgcagctttgaataaaatcaatgaacaaccagtgaaaaaagtggaaacttcaacatttgtcttagattcttatttgaatcaaagtgttgattttgctaaaaaaattcttacaagtcatcaattatcaccactaacaataggtgatggtaagacggtaattgatcaatatccaaaagctaagacagaactttcaagtaaatcacgagtctttttacaaacgaatggaacaaatataacaatgccttcaatggaaggatggtcgcgtaaagaagcagaggcctttgcttcgatggcaaatatagatttaaaatttgaaggtgttggttcaatttataaacaaagtgtaaccaaaggaacaaaattaaaagacaatcaaaaagtgactgtttatgcaaaataggattctttaaaagaattctatttttttgtttttaacatataattgaatggtgatgtcaatgatcttttcaaagatgataaagaaaattaaatgggtcaatattataatgacattgattgttatggcaattgtcataagacttggctatagtcaattttatgcttatgaagaattatccttgaaagcaacacaatcatggcaaagaggtttccctttagaagcagcaagagggaaaatctatgatagtcaacaaaaagttttggttgataatctaacaacatcttcactgattattgttcccagtcaagtcaaggattatgtcacaaccgctaatcagctttctaaaatattaggatgttcaaaagaaaaaattcttgaaaaggttaaaaagaaagtctcagttgaacgtattcaaccagaaggtcgacaattaactgaagaaaaagcctatcaaattgatcgtttaaaattacccggtgtctatcttgtacaagatacattacgttattatccccataagaactatttagctcaaacgctagggtttgtagggatagataatcaaggattggttggtttggaattaaaatatgatgaatatttatctggggtaaatggtagtattaattattatatgaatgcgaaaagtcaaaatttaaatatttatccagctgattatgtctatcctactaatggtatggatattgaattaacaattgatagtcgcgttcaggatgttgttgaaagagaacttaacaatgcttatacaacttataatcctgattctatcttatgtttagcaatggatccgcgaaatggcaagatacttgcaatgtgttcaaaaccagatttcgatccaaatgattataaaaatgccgacagtcaaatttataatcgtaatttaccgatttggaaatcctatgaaccagggtctacttttaagattattacttttagtagtgctttaaatgaaaagttatttgatatggataaagatacgtactatgataaaggatatgaaattgttaaaggagcgagaattaaatcttggaaaaaaggcggacatggattacagacttttagagaagttttgcaaaactcgtccaacccaggatttgttgaaattgggagacgattagggaaggaacgtttgtatcaatatattcaagattttggattaactaagaaaacgggtgttgatttaactggagaatcttcggggattatgtttgattatgataaatttaatgaagttgaacaagcaacagtcgcgtttggtcaagggatttcagtaacacctatccaattagtaagagcggtatgtgcttgtgtaaatgggggacaattatacaaaccttatattgttaacaaagtttacaattcaaaaacacatgaagttgttgttgaaaataaacctgaaaaaattcgtcaagtgattactagtgatacttctgcaaaggtgagagatgccatggagggggttgtaactgatgggggagggaagaatgcctatattgatggttatcgtataggcggaaaaactggaactgctcaacgtgcaatcaacggaacttatgctggtaatgggtatattctttccttcttaggagttgcgcctattgataatccacaaattgttttatatctagccatggataatcctaaaaaatgtgtccaatatggtggaacaactgctgctccaattgcgagaaagattttcatggatgtattaccagcattacatgtaaaaaaagtgacacaacaaagagaaaaagcttatgtttggactgatgtcaagacttatgatgttgaaaattatgtagggaaaacaaaaaaagaagttaaaaatgaacattatggttttgaatttttaggaagtggtgattatgtcattgatcaattgccacgtgtaggtgaaaagattgaagatggacaaaaagtaaaaatcatgttaggaaaaaagccataaatatctttaagaatataaaaaataaaggaatcatctcaacaatggttcctttttatgatataattaaagaatcgattggagggagtctttgtgcacatacaagatcgtgaaattagaaggattgttgatgatgaaaaagaatatcgttatggtcgttttattgatattcgttcacaattagagagaatgacaatttcattagatgaaaataatggctgttatagagtgaatgcaagaattgctcaagaaaatgaaagattcattgtctctataaagatttcacataatggggatattatacaggcaacttgttcttgtggtatgcatggacattgtcgccatattgctactatattgttttatttaagaaaactagatgtacaatcttttccttatttctatgaaatgaacaatgaagcaagtaaagctaaaaaattagaagaaatagaacgtcaaagaaaagaacgtattctttctaaaaaacaacaagaatcattagatttaatcaccttatataaagatcaattattaagagaatctttgataccattatcatctaagcaatatcgtgtcaaagtctttgttcaaagaaaaaaagatatgttattgatggtattaaaagtgatgaatgatgaacaagggtatgttgttaaaaatattgaaacatttttaaatgcaattgttcatcatgatagtattaaatatggcaagaattttgaatttattcatagtgaagatgcttttgatgatgattcattggacatcattgcctttgttagaaaatgtttcttaaaaaatcaactcttacaaaatggagtgattcgtgctttgattatgagtgatgaacacttagatgagttctaccatttgatgaataatttaccttcatcatattgtgatattgcttttgataaaaaagaatatcgcattcctttagaaataacgactcaagataaaaattatgttttggattttaaagattatcaagaatttgatcaagtgatgatgacaagtcatggaatgtatactttgcaagatgatattttatatcaatatgattttcatgaaccgactaaagtcatgacttttattagaaaattattagaaactcgaggtggattatatgttcctaaagagtctttgatggatttttataaatatatcttggttgatttgatggacgatattgaattaaagacaacgctttttgatgattatcgtcaagagaatttgattaatttatatggtgatatgactagtgatgatcaaatatgtattcagttagagtatatttatgatgatggaattgcttatggatttgatgaaaataatgtacataaatctaaagaagctgatttaatagaagattatttacgaccttatattgaagatatcgaagatcatgtgatttatttgcaatatgatcatgagtttgcctatcaatttatgaaagaaggtttgccttatctttctacttattgtcaaatctatgtgactgatgctttaaaaggtttatcacaatcacaagcgatgcatattcaagttggagttcatatcaaccatgggcttttatctatgaatattgaaagtgttgatgttcaaaaagaagaattgatggatattttaaaggcttataagaagaaacgtaagttttataaacttaaaaatgggaagattgtctctttagaaaataaggaatttaaagaattagatgagttaacttcaacacttcaattaaagagtcaggatattgttaatggagttgtagaaattccggcttatcgtttatttgaattagatcaatttatgaatcaagaatcttctattcaatattctagaagtgaagaatttaaaaaatggacaaatgaattggttgaaagtccacgttcttttgatattcctgatcaatatactgatattttaagagaatatcaggtagatggttatcaatggttgagattgatggagcattatggatttggtggtatattggcggacgatatggggctaggaaagactttacaaatgattgtttatttagagagtgtaaaaagccagggaactcatatggttgtaacgccggcaagtttgttgttgaattggcaagacgaaatagaaaaatttgctgctcatatgaaggttttatgtatttatggacaaagacctgtgcgtgaaaagttaattgctcaaatatctgattatgatgttgtgattacatcttatgattatttaagaagggatattgagctatatgataatattgaatttcatactgtcgttattgatgaagcacaatatatcaaaaatcctaaaacaagaaatgcaatgagtgttaaaaaactgaaagccaaacaacgctttgctttaaccggaacaccaatagaaaactctttagctgagttatggtcaatctttgattttttaatgccacattatttatatcattatgcttatttcttggataattttgaaagaccaattgtaaaagaacatgatgaagataaacaagagaagttaaaacagatgatttcaccatttgttttacgtcgtaataaaaaagatgtcttaaaagaattgcctgataagattgaacaaacgctttacttaagatttaatgaagatgaagaaaaactttatttagcaaatcttgttcaagttaataaatcattacaagaaaaattaaatatgaatcaattaggtcgtattgatattttagcaatgttgacaagattaagacaattatgtcaagactcgcgtttgttgtatgatataactgaagaaccttcttcaaagttaaaaggatgtatggaattaattcattctttagaagaaaatcataagaagattttattgttttcttcgtttactagtgttcttcatttgattgaagatcaatgtcataaagaacatatttcttattatcttttagatggtagtacaccaaaagaaaaacgtaaggaaatggttgatcaattccaaaaagacgacacaacattgtttttgatttcattaaaagcagggggctctggattgaatttaaccagtgctcaagcagttatacattttgatccttggtggaacatgtcggctaaaaatcaagctacagatcgtgctcaccgaattggacaaaaagaatcggttcaagtcttttcattaattatgaaggatagtattgaagaaaagattatggaattacagaaacaaaagaaaaatttagctgatacttttgtagaaggaaatcatggtgaaatttctactatgagtattgacgatatgaaagcattatttgagatctcctaagggaggtctttttttgtttaaatgaaaaagtgcaaaaatgtagcgaaaaagggtacaaatagagggttattgtgctgacaattgtcgaaagctgtagaataaaagacaaatttggaatgttttcatccttttaggggctgttttatgcctagatattgaaaaatattttaaaaaaggtaaatttcgtatagcgaggaggaattattatgaaaattgtttattgcgaaaatgctaaaatgaatcattatgaaattcgtttggtgacacatcccaagaatattaaattagctaaattgctggttagtcaatttaaagaaacaattggtgaagttgagttgtatgatgagtataaaaataaatacccagtttcattgttgacagtttattattttgaaattgttgatcataagatttatgcttatacggaaaatgacgtatttagactttatggaacaacaatggcaaagttaaaagaaactgttgaaccgatgggattttatcaaattaatgtcagaacaattgtaaatgttagacatgttctttattacaagaaacaaagagggtgtcgtagaagaatggttttagataacaaggatgttttggtttcaagtcgtcgttatcgttgtggctttgataagatgattgaagataaacattttattggattagaaaatcataagatataaaaatggggacaataactgactgttaaatggagataagattgttgtcttatatgtgttcttgtacagaagatgagagagattgcccaaagggcaattttctttattgtctcaataaagaaaatatgaatatttttatttccatttatagtaatataaaggaggtatttttatgaagattagttatgatccattttggagaacaattgaagaaaaaggacttaatcaatatattttgattaataagatgggagttagaaatagtttgattcataaattaagacataatatggatataagactatctacattagctgatttatgtgaaaaattaaattgtaaagttgaagatattgttgaggttgttgaagaaaaagaaacaattcacaattaaattgtatacatagagtataatcttttaatataatctagattaaaggagatttataaaggaatttagaagtatggaaaagattgtatgaattatcagatcaattaagagattttaaaccatgagatgatttatggagtggtgatttgttgaagctaacagatgatgaaataagtgttgttttaaaattttatagtggcatatattttaaatgagggtgtccctcaaagggtttttaagaaatccctgagttttttagcaattgtagatatatgtgaacgatatgatgatggatgaaatgaaacaaatgttgtaataaaggcctgatgggcctttttttcttttgtaagataattttgtgataaacgggtgtcaatcatcctacttatataaataactttgaaatcgtttatatggaagaaaaaagataatgacgcaataaggacattatcttttgaactggatataaagaaaaacagttcaatttgaattaaactgttttataaagataggattttattttatatcatttttatcaatatattttaaatcaatcattttcttagtgatttgctctgcaagtagctgattaaatttagcgtttccgtttagcatatcaacttgtaaaaagctagaagggatatatcctttttgtaaatcttttttatcttgagctgttaatgttattttggcatctttaataccatcattgagtaagtaatatctaaaatccaagaaatgctctttatgttcctcttttaagactttattcatatcatcaacgattggtaatcttcttttagaagtaagagaaacaacaatataattctttgttttgagttgattaataatagctctttgataagttattgttttaaaaataccattttgagtttgtggatcatatgtcccagtaaagataattgcaacattgtttttttcaaaagttggaatctctgattttatttgtgtcaattttgtaatgactttttcgactccattttgatcacgagtaaaggtatgtgtttttttagttgcattgtattttaatttcccagatataccagcaatttcaaccgttgtaaaattactacctttacctttaagaacatttaaaacattgttatctttatcataaattttaagattaactggtgttgcagtttcaggaattgttatgttattggtgtaaatctttatttttcccattctaatcgcaatatcttgagtttgatcttgggctccgccaaatttattaaccgagaaattggtagctgaagaaagtgcggttggataagaagaagattttgcaccaattgttaaactatcacctatacagtaaattgtaggtgtattagcattagaatgagttgtttcatctaatggctgattttgatatttttgttgtaattcttgatatttttgactctcttttctgattgtgagagtgttgtatccaataagtgtaatgataatacaaatcaaaaggataacaactaaaggaaaagatatttttttcatcttaatagtaatagtatgaataacttcctgaaccagtatcagattttgttaagacactacctaaaacattaacattgtttctttgaagtaagctaatacaattagcagcatctttacgttttgtatcttgagcggatacaacaaaaatagttccatctacagcattacctactggaattgcatcggaaattgttccaactggagcacagtcaacaataataaaatcataattttgttttaatacattcatatattccttaaagacatctgaaccaagtaattcagaaggattagggacatgaactcccccagttaaaacagaaagtgttccaataaagctaggatcactcattttttggatgtattcaggattaaaacgatgagtttttccaaattcaatcaaggcatcagtcaatccttgcttatttgacattttcatatatcgatgtaacattgtttttcttaaatcacagtcaacgagcaatactctttgatattttgtagcaaaaatataagctaagttcatagacgttgttgtttttgcttcaccaggttgagttgatgtaattgaaattgatttaatttctttatcaactgtagagaattcaatgtttgtacgaatatgtctaaaaatttcagtataatcaaattgattatgtttttttgttttatcaagaatatttaatgtttttcttgttttgtgtttcttttgagccatttgttatctccttttcaataattttttgaagaatgaagttttgacttcaatatcttcaacattctcatcatgaagaatatgttcaggattatcatacattaatgtttttaatacttgataatcatatttttttgataaaagatcaaaagtttcttgtagacgaggaatacgatgtccttcacaacgatgagtatcactagcaatcacatgggctagtccttcatcaatgagatcataggcattctttttaaccgtttttccatgaatacctaataaacttgaagcattcacttgaatgacataaccactatcgataaattcttgaatacgatcaatatcaataccatctttaaaatatctttcaacatgggcaataattggaatcaatcctttgacttctatttcatataagaaatcttcaacttcatgagaacttcctaattcttttctcacatcaaattcgactaataaataatgcgtattttcaattggaataaataaatcctcttggatagaatctatacaatcatgatttaaaaacaattcacaaccttcaaagaccttaatattttgtttttgagcaagttgttttaattcttgaatacgttcttttaattcatgaatctcatctagcgtgtgtgatccaggaataacatgtggtgttgccacaattgttgttatgttgttttccttagctatctctaatgcttttatagcatcttctttggaaggaataccatcatcaacatcccatgcataatgaccatgtatatcaataaattgcatatacttaatcctcgaaatatggaattgaacctaagcaaggaacaccaagatatttttctgcatcttccttattgtgaatacgtgtatctaacataaatttaataaataaatatccaatacttgcaaatgctcctaataatgcaccaataaccaaattcattttaagacttggtgaaactggtgaagtggcaacttctgcttggtcaacagttgtaatgttgttgatatttaatgtttcttttgcttcttttttgaaagtagaaaccatttgatcaacaatctttttacttagttcaggatcgtttgtctttgcagtaatagcaataatctgtgtatttgtttcattgacaatcgaaacattacctttgatttgagcaacagttaaatctaatttatcagccacttgactttgaatgttattaccttttaacatttctacatagttattaaccattaagttattggcattgatttgagtataatcaacaattccttcagtaacttcaggtttagggtagatacgagcagttgattcatatttcttactaataaagaaaatcgtaacaatgccagcgataatagcacaaactaaagtcgagataataatcattttatattttgatttgagtaattgaaataattcacctaaattaatttcaatttcttcatcattttttacaatttcattatcaatcatataatcctccttatggttttatgaaattcttttagaaatatcataaatgtatcatattttcttgaaattttcgacaaaacaagttatgatagctgtgttataaagatatttcttagtgtattatgcttcaagaaagggaaaaaatcaagaataatccttgattttggtaatattcctaagaaaaaagctgaaattaatcatttggaagggatgaaattataaatgaaaaaaatcgtggggggggggtctaaatatgaataatgtaaaagatagaaagcaattactgattcggcgtttaatactattattggtggattctatcagtgtgattgttgctttctatggtgcactagccctctattttaatggacctatcgagtcaaggtttattcagggatcattaccattagcaatgattttactggttataagtcttggcttgtttgctgttttaaagctgtatacaagtttatggcaatttgcttctgtaagtgaattgatgaatattgttatagcaacagctatgagtacagttgccaatgtgattatttgtgaatcgtttggtttttcaccacctgaaagtacatactttatttattttatggttgtgacaatgattgttggtggaacacgttttggatatcgtttcttaagactttatgcaagtcgacatcatttgtttgggagaactgatgaacataatacaagagttatggttattggtgctggatcagcaggtgaaaaaattttaagagagacattggtttctaagagtttaaataaggatatcgtttgttttattgatgatgatccaaataaattaggaagaacgattcatggaataccagttgtagggaatagttattctattgttgaaaacgttcaaaaatataaaattgatgaaatttttgttgctttaccatcaatagaagataagcgagtttcagaaatcttaaatatttgcaaagaaacaaaatgtaaattaaaaagattaccaggaatgtatcaatttatttctggtgaaattatccttaataaattaaaagatgttgagattcaagatttgcttggtcgagatccaattaaagttaatcttgatgaaattatgtcttatgtaactgatcgtgttgtcatgattactggtggtgggggttctattggtagtgagttgtgtagacaaatcgctgaaagaaatccaagacagttaatcattgttgatgtttatgaaaataatgcttatgatattcaattggaacttaaagaaaaatatcctaagttggcacttgaaacattaattgcatcagtgagagatgccaataaagttgatgcattgtttgaagaatatcatcctgatattgtttatcatgcagcggctcataaacatgttcctttgatggaagatgcaccacatgaagcgattaaaaataatgtttttggaacactgaatgttgtcaaggcttgtgataaatatcatgctaagaaatttatcttgatttcaactgataaagctgttaatccaactaatattatgggtgcttcaaaaagattatgtgagatgattgttcaaacatatgataaattatctagaacagaatatgttgcagtaagatttggaaatgtacttggatcaaatggttcagtgattccattgtttaaaaaacaaattgcgcatggtggaccagtcacagtcactcatcctgatattattagattttttatgacaattcctgaagcagtatcacttgttttacaagctggtgcttatgctaaagggggagaaatctttgtgttagatatgggtgaaccagttaaaattgtagatatggctagaaatctgattaagctttctggatatgaaccagatgttgatattaagattgaatttactggattaagacctggtgaaaagttgtatgaagaaatgctgatgaaagaagaaggcatgaaaacaacacctaataagcttattcatattgggaaaccaattgtaattgatactgaaaatttctttaatgaattaaatgatttgtatgccattgcttatgatgaagatagtgatatgagagcagcagtaaaacatattgttccaacttatcattatgaagaaacaaagcatggtgtaagaagaaaaatgaaagaaaagaaagaagaaacagaatctgaagctgtttattcttaattgttatttaaaaataattgaatctgggtaatcgtcgcgtggtcgcgttgcccaaacaatttgttatagtcaaaccgagtcgaagtatgcttgttttttatttcgatgggcgaagcatatccaaatggagggattattcatgtatgacaattggtatgctgtacaagtacggtgtggaaaagaggaaaaaatagtaagagcatgtgatattttagttgatagacatgttttaaatgaatgttttattcctagatgtaagaagaaaaagaaatttagaggtcaatggcatattattgatgatattctttttaaaggttatgtttttatgattagtgatcgtgttgatgatttatttaatgaattaaagaagatacctgatttaacgaagcttttaggtaatgatggtaaggatatctttcctatatataaggaagaagcaatgtttctggcaaggtttggtggcgatgaacatatcgttgaaatatcaagtggatacattgaaggtgataatatttttattactaatggtcctttgttaggtcaagaaggaaatattgtgaagattgatagacataggcgaatggcctatgtagaagtttctttgtttggtcaagtgacaacagtacatgttggacttgagattattagtaaagtttaatattgattagtgatagttcatggcttaggctatgaactttttttgtgcttaaaaagaggggattttatggtaaagagatttgaaaataaaatatggggaagattgtataatagggacaatcagcaagaataccggaaataagtggttttacgggctttcctgtttttatagattacaatttttctaagaaaggaagtaaagatactgctatttcggtggtaagctgaattgtctttactaaaccccaaattgaaaaagacacgaaatgaaacaggcagccttttgataatctacagattaccaagggctacttgttgtatgtaaatatattttaattgaaattgaaaaagataacaagatgcagatttgccatgttttctttaataaaagatgaaagtttatcaaatcaaaattataaggagatacaaaatggataaaaatagtatgattgcttcaaaaagtattagtttttcaccgccggacatatcagaattagaggttgaggaagttgttgcaactctcaaatctggctggattacaactggtccaagagtaaaaaagcttgaaaaagaagttgtcaaaagatgtggtacgtctaaagcagtttgtttgaattctcaaacagcttgcgcagaaatgacattaagggttcttggagtgggggcaggagatgaagtaattgttcctgcttatacatatacagcgacggcttcagtggttgaacatgtaggcgccactttagttctcgtggattgtgaactgggaaaattcactatggactatgataaattagaagaagctataactgaaaaaactaaggtaattattccggttgatttatttggtattccttgtgactacaatcgtatatttaaaatcgtggaaaagaagaaagagctattccatgcaggggataatgaaattcaaaaggcattaaatagaattatagtcatggatgatggagctcattcttttggtgctacatataaaggaaaatcagtcgctcaatatcctgattttattaacttttcattccatgcagttaagaatttaactacagcagaaggtggagcagttacttggcgtgatataaagggagtagataatgaagctttgtataaaaaatatcaacttttatcattacatggtcaaagcaaagatgctttggctaaaacaaaactaggtgcttgggaatatgacatcgtaggaccttggtataaatgtaacatgactgacattcatgcggctattggcttaagtcaaagcagaagatatgattctttgatggctagaagaaagtggattataggagaatatgataaggtatgtgaggaatgtggatttacggtgttagaacattatacagatgaacacaactcctcgggacacctttatatcgttcgtttatttaagtctggtggagaagcatttagtggtgaagaacgtaatgattttattactaagatggctgagcttggagttggtacaaacgtacactataaaccacttccacttcatacagcctataaaaatttaggatttgatattaaggactatccaaacgcatatgaacaatatgtcaacgaagtaactcttccactgcatacttgtttaacagatgaagatgttaattacgtagtgtgggctgttaagaaggtttatggtgatatgaatgtataaaaattttttaaagagattactagacattatcgtttcgttatgcgctatgccatttgtattattgttcgttgttgtatttggaatagcaattaaattagaagatggtggacctgttttctacaatgttgaacgagttgggcaatatggaaaagcgttcaaaatgttcaaactaagaagtatggaagtaaatgctccagatattagaactgagagcggagatacatataactcagaagatgatccacgagttacaaaagttggaaagttgattcgcaaattaagtattgatgagtttccacagtttattaatgtattaatcggagatatgtctattatcggaccacgtccagacccaatggattggttagaaaaatatacagatgaagaaaaaatatttcttgaagttaaacctggtataacaggatatagtcaagcttattttagaaactcagtagaagcaaaagaaaagattgcgaacgatgtgtactatgctaaacattgcacttttacaacggatttaaaggtttttttcaaaacaatcgcagtcgttttacatagtgacaacgtttacagaaattaatagaggataaactaatgaagaaaattatgatattgggagctagtattcttcagcttcctgcaattattaaagctaaagaaatgggattacaagttattgctgtagatatggatcctaacgctattggatttaaagaagaaaatgtgatttgtgaagttattagcactatcgatgaagaaggaattctagcggcagctaagaaacataacattgatggaatagtaactatttgtactgatttaccgatgagagctgtagctagagtggcaagagaattagggttgcctggaatttcagaagaagctgcgtatatgtgcacaaataaaggcgctatgcgtgaaagacttaaacagtgtggagtaccagttcctgaatattacaatgtggttactaaagaagaatattttgatgcaataaggaaatttgagaataaatgtgtggttaaagctgtggataactctggaagtagaggtattcaacttatcaatgatgtcaatgatataaagagcgtagaagaagcatatgaatattgtaaacaatactcacactgtggagagcttgttgttgaagaatttatggaaggaccagaagtatgcgttgaaacattgagtgttgacggtgtttgctatccgattcaaatcaccgatcaacttgcaaaacaacctccatactttacggatgctggctataaccaacctactcttttaaacgatgaaactaaggaagaaattaaaaaaatagctacagctgctaatatagcgctcaagaactataaaggttcgtcatgtacggaaatgattattacgaaacatggaccaaagattgttgaagtaggagcaagattagctggtgattgtatgactacgcatctagtacctctttctactggcgtggatatggttagagcggtaataaatattgctttaggtgaaccagtagattttctgcctaaatttgtaaaaggttcttgcattcgttattacatgaaaccagtgattggaaaaatcaaaggatttgaaggtttggataaagcagctgaagttgaaggaattaagcaagtaacaatggttaaaaaagttggagatatggctgttgagttaagaagtagcggtgatcgtattggttttgttattgctcaaatggatactcctgaagaagcaattgcacaatgcgagaaggcattagatttaattaaagttgttgttgaataaaaatatgataattagagggggatagttatgaaaagagttttgttgattaatgatgctgtatatttacctggagaaggcggctataaaagaacgatgtatttatttaatatgatgcttgaattaggttatgatgttacattgttgacaggagactttaaccattatgcaaagaaaaaccgaaatgttgagaaattcagaaaagattatccagaatacaatgataatctagtgatattacacaaaatcccatataaaaaaaatatatcgttattaagatatttcagtgatagaaattttgcttataaagaagcaaagtgggtaaaaaataataaagataaatttgacattgttttacttgatatgcctgatattgatgcaataattaaaacagacaaagtgttgaaaaatacaaataaagctatagttgttgatgtaagagatttgcatccagaggcacttaaagtcgtttttaaaaaccctttagtctacaatgttctaacttttcctatgaaaatgcgcgcaaataaagcgtatgcatgtgcggatgagtttgtggctgtttcaaaggaatatttagacagaggattagcttgtaacaaaaaatcaaaaaatccacaagtagtatatcttggatctgctcttgaattatttgatgaaggcatagagatatatagagatgcaataatcaaagaacaaaatgaattttggattacatacgtaggaactataggagcaagttatgattttagaactattattaccgcaatgagcaaactaaaatccaaatatcctcatttaaaattcaagattttaggacaaggacctgaagaaaaagaacttcagtcattcgcaaagaaaattggtgcatctaatgttgattttttaggatttatggattattccaaaatggcggcatttttaagcaaaacagacattactataaataatataaaaaggaatgcttcgcagagtatcatcaataaagttgctgattattttgctagtggaaaacctatgttgaacagttgtaaaaatgaagaaatgaaatggttgatatctaactttaatgtaggattaaattatgaggcagaaaatgtagatgattttatagaaaaattcgaaattctttacaatgataatgatttaagaattgaaatgggaatgaatgctcgcgcgttagcaaatgatcgatttgatagaaaaaatagttataaaaaaattatagatatactggataatactgagaagagagtgagaaaatagagttatgaaaaatttattagttttggttgctgattatcctaataaccatggaaacgttagtttgatgtatgttcatacgagaaatttatattatataaaaaataatttaaatgtgactgttcttaattttgctgctgaaactggatatattaaagacggtataaaagtaattacaaaaaaagagtatgataatgaaaaagcaaaatatgactgcttgattttacatgctgcaaacttaagaaatcactatagttttttaaagcgagaaggtaataaattcgatagttttattttcttttatcatggtcatgaagtgatgaaaattaacaaggattattgtcctccttataattataaaaaagtcaataaaataaattactttattcaaaatgtatatgattatttaaaactcaaaatttggaaaaaatatttgatatcagtagttggaaaatcagagtttgtctttgtgagtaattggatgaaagagatatttttagaaaacacgaaaattaatccatctttattaaatgagaaaatgcatataacatataataatgtaggattggaatttgaaaatttaaagtatgatgattctaaaatcaaacactttgatttcgtgactattcgagcaaatattgatggctcaaaatactgtattgatattgtaaacagattagctaaaaatacacctggaagtaaatttttagttgttggaaaaggtgaattctttaatcattttgaaaaagctgataatcttatttggttaaatgaaaccttatctcacgacgaaattattgaagttcttaatgacgcaaaatttgcgctaatgcctacaagaatagatgcgcaaggtttgatgatgtgcgagatggctgcttttgggatacctataataacatctgatataccagtatgtcatgaagtttttgatgactttataaatgcattttatatatctaacgatgatgaattagcttcgttggaaaggtttttaaattttgatttgaaatatataaaggatactagattttatatagagaatactgtaaaaaaagaaattgatattatcatgaatagcaattcatcaagaagaatgggaaaggagtgttgatatcgtgactatattattaggaattgcacagtttatgataattgcgtatatatgtgtgtttgaatttaaaagaaaatcttcttcaatttttctatgggcaacattaatgattatgtttggtgtcatgcatttaattacttcttttataggagatgatgtttactcaaattctgttttaattgaggcatctatttttgttatattgttttgctttgtctatataatatgtagaatggtattttctagaaacataaaagaaagaaatgtatttacatacaataatatgcggaattctcttttaaataatcataacaaattaaatttttttttctatgcatatatattagtttttgtttttaaaatttttccttatatacgattcgcaggaaatatattatctacttcatggagtactggaagagatttttcggcaagtatgggctatgctaattcgtcacagttaataaatatagcattctattcattggcaggtatgactgctgtattgtggatgaagggacaaaagaaaaaatacattgtatccttactattagttttatttaatgtaattcttactagaaatcgaatcgagatactaccttttttttgttcaattatttgtttgtttttatggaaaattaaatctttaaagtttaaacatattatattagcaggtgttggcgctattgcggtagtttatattgtttatggactacgagtttttagacattatggaactataagtgattttatattaaattataatactaaagaattctttgataaaattaatctttatattaaaacaggtaatggtgaattagggctactaagagatatgtattattttattgatcataataataattttccagaatttagtagattatattcttacatacgtatggttttagtttatatacccacacaattttctttaggattaaaaccagatgattttgcaattgctatggggcaagcaatggggatggcaacaggcggaagtactcatccaaccttatttggagattgttatgcgaatgccggattttttggaattttactaggtgcattttgggctttttatgtaagtgtgattgataaaattacgtttaaacgtaaatcaacagaaataaaaattttagtttatattttaaatgcagtagtttatacaattattggtcgtggatctatatacaatggattttggtttgttgcttatggaatgccacttttatgctttgttgaatattgtttatatcactttaaatttaaaattaataataaattattaccgttaaggattagagtaaaatgaaagatataaaaaaaagtaataatatagcaacatctgcatttctagttacggcgatgatgttatcatttaaaattttaggatttataaagcaagcggtaattgcttattatttcggagcaaacggtgacacagatatatattttgttgcctatggctttgtctcaggaatttctgaaataatcattaattcgctaagagtatcaataatagtggtgtatacttcaattattattaataaagggaaaaagtatgctaatggatttgtaagtatacttttagaaattttcattcctttatcaataataataattggaattattattattctagcaccaaatctggcttctttattggctccgtattatagctatgaacaaaaaaatattctaatcaattatgttatagcacttggaccaataatttctttgtcaataattgaattaataatgggagcaatattagatgcaaacaaaagttttttcatttcgagattacagtcatttatttatagtgtatcaataattgttgtttctattactttatcaagctgtcttggaataaaatcattagtattagggcaatatatatctagtgtattattctgtttattgttaattggtgtggtttgttataaatatgaatttagatttacattcattactaaaataagagaatatcatgaaataaaaaatgttttaaatactgcggctccattatttattggaaatggagtattacaaattaatcaaattattgacaaatctattacgacagggttatcagcaggagcagcttcatctttaatgtattgtcatacattagaacaatttgtaactaatataatgatagtgaatattggtaatgttttattctctcatttttccacggcagtagctgaaaaaagatttgataatgtgaaaagtatcttaaaaaatgcaataaattcgatgattattattttgttgccggtatctgttatcactattttatgctcgaatgatattgttagaattgtttattttagaggcggatttacagaagcagctgtcaatatgacatcaatagcgcttattggatattccatttttttcccatgtgttgcaattagagatcttactataaaaagtaattatgcattttcagacacgaaaggtccaatggtggcaagtataatatctattatctgtaatatattcctcagtatatctttatcaaaaataattgggatattaggtataaccttggcgacaggaatatcggtaattgttggtatgggtttaaatattttatgtttcaaaaaacacatgcccaattatgattttataaatcattttaaattgtgttttaaattgttaccatgtacatttccaatattaattggcgactatgttttgagttttatatctgtcaacaatccttatataagattctttaccatttcaataattggatttattatatatatacttctaggttatttattcaaagtagaattaatagaaaaaatgataagtaaaataatagaaagatgtaggagagttatatgccgataaaagtaacggagaaatgcgttggatgttttgcttgcactaatatatgtccaacaaaatgtataaatatggcacttaatgatgagggatttatcgtaccagaggtagatttcacaaaatgcgttaattgtgacaagtgcactgagacttgtttacagcagaaattacctagtatgaatgtgccaataaaaagttatagattattacataaaaataaagaaatatggaataaatcgacatctggaggcgctttttctgcaatttgtagttcttttaatgatgatacttatttctgtggtgcatcatttgatgaaaatttagaggtaaaacatataattgtaaaaggttatggtaatgattttaataaactattgaaatctaagtatgtacaaagtaatatcggaagcgtatttactgaaataaaaaagttattactaagtgataataccgttattttttcaggtactccatgccaagttgctgcgttaaaattatacttaggttgtataaagtatgataacttatactgtatagatgttgcatgtcatggagtaggatctcccaaaatattaaaacaacatttaatgacaattgaaaataaaaataaaacaaaaatcaataaaattggattcagagaaaaaagatttacactgtcaggtttagaagattatggctttcttattgaatctgacaataaaaaagtaattgattattcagatatctatactaaagcttttcataacggaattgtgattagaagctcatgtttagattgtcagtttcataaaaaagaaagggttggtgatattactatagctgacttgaaaggaatgtatgaaactttccctaaggagattaaggacaaattcaatagatccgcggtttttgcaaatacaaaaaaaggtgttgagatagttgaaagactaaaacaagaaaaagacatcgaatgtattgaatgtacctttggtcaggctagtaaaaataactcaccgctttacgaaaagcataatcaaaaaataagtgatagacgaaatcaattttttgatatgtataaaacattaagagatgatgatgtagatactttattgaataattatattaataaggaatcaatcatattaaaaatctggttgaaaatacctgaaaaacaaagagtaattgtaaaaaaaatattaagaaaaggagattctaaatgaaaataggcattgtaacctggtataagaattataattatggtggcactttgcaagcttttgccttaaagaccatattagaatctataggtgtagaagttgaatttataaattatgatggtgaagatagtaatatgaaaaagaagacaattagaatctttagaaatatggcattttctatcttatatcctaaccgagcggcaacaaggcgcaaaatgaaaaaatttattcaaatgaatataccggaaacaaaacattttaatagcttttttgatgttgataattatgttgataaagaatttgatgcagttattgcaggatcagatcaaatatggaattctataaaaggctataataaattttattatttagatttttcatctgatgtaccaaaaatcgcatatgcacctagcatggaaaaaatagatgaatcaaaaaaagagttttgggaagctgtggtatttagtcttaataaatacagtgctttatcagtgagggaatcggttatcaaagaatttttagaatctaatttaaaaaaggaagttaaagttgttgttgatccaactttactattaaattgtaaagaatggttcaatgcattggatgtaaaagattgtaattgttccaaatctatatttgcaaatgaagaatacatatgtgtttatatgataacttacaatgaagaatattttaatcaaataaatatttttgcaaaaaaaaacaatctcaaagtattgtatttagctagctcaaagagtataaaaaaaatacagggatggatatatcctagaacgggtgttggcgtagaagagtttttggatgtaatacataatgcaaaatattttttcactgattcatatcatggaacgctatttgggttacaattatctaaaaaaatgcttattttaaaacgatttaaagattctgatcctaaaaatcaaaactcacgtttgttacagattttaaatttatataacataaaaaatatttatgttgatgaatataatataaagaaagttatcaataacatacctgatgttgactattctcaagttcataaagaaatagatatacaaagaaaggaaagtattttatggctattaaacaacatagaaactctaaagaaaagaatataatgctggtcttcggtacaagacctgaagctataaaaatgtgtccattagttaatgaattaaaaaaaagagaaggtatcaagactgttgtctgtgttacaggccaacatcgtcaaatgcttgatcaagttctcgaagtatttaatgtagttccagattatgatctttctatcatgaaggatcgtcaaacattattcgacgtaactacaaatattcttaataaaattggagatgtattagatgaagttaaaccagatgtagtattagttcatggtgatacttcaactacattcgttactgcacttgcttgcttctataagcaaaccccagttggacatgtagaagcaggtcttagaacatacgatatctattctccgtatccagaagaatttaatagacaagcagttggaattattgctaaatataattttgcaccgacagaacgctcagctaataacttaattaaagaaggtaaagattctgaatcaatctatattacgggtaatacagctattgatgctcttcaaactacagtaagagctgattttaaacatgaagtattggattgggctgagggcagtagattgattgtaattactgcacatagaagagaaaacttaggtcaaccaatgcatcatatgttccgtgctataaggagaattatggatgaacatccagatgtaaaggcagtatatccaatccatatgaacccagtggtacgtcaaacagcagatgaagaattaagcggttgtgacagaattagaatcattgaaccaatggaagtattagatttccacaacttgttagctaattcttatatgattcttactgacagtggtggaattcaagaagaagctccatcattaggaaaaccagttcttgttatgagagatactacagaaagacctgagggaattgcagcgggtactcttaaactagtaggaacagacgaagaagtaatttataaaaactttaaagaattattagaaagtggagagtcatataataaaatggctcatgcagtaaatccttatggagatggtaaaacatgtaagagaattgctgacatcttagaatttggaaaaactgaaatttaagtaattatgttttgttatacataacgtacaactatgaatatcaagaatgttcagtttattattttgaaaaaataacctctaaaattgaatagaggttgtttttttggagttttgactttgatatgagtggtcaatacaacgttggataattaatatttagccataaaatagtattttatagtggtgcgttatataaaaacactaatacgaccatttaaaaagagggtaaatatgaaaataggagaaaacatcagatttcgttcggatggacgttatgaagcaagatatatgaaaggtcgaaatattgacggatctattaaatatggatattgctatggtgccaccgaagaagaagcaagggaaaaaagatcttatcaactaaataaaatgaaaatttcgagaagtatgaatttactcattctaggcgctggaagtcatgggagagatgtaaagaatattgctcagcaactacacatttttagagatataaagtttttggacgattttaagataggaaatgatataattggaaaatgggaaattgcagacaaattgcttaatgattatcctattgccattgttgctgtaggagataatgagaagcgtaaacaatggacattactattacaagaaaatggatttttgattcctactctagtacatcctacggcatttgtttcagaaaatgtcgagttgggagtaggaacagtagtttgtgcgcgttcatcattgtcgaacgatgtaaaaataggtaaaggttgtattattgaagttggtgtaacaattccaaggaatactacaattcgagattgggttgattgcactattaatgaaatgatataaaacggagggatgaatatggatattatcaaaaaaatactagaacattttgaagcaatgggtaagcttgaaggtgttgcgacagattacccattgatgctttgtatatatttaggaattttccttatttgtactattgcgtgtgttgtgttatatttctcaaaacacagtaaaagagttgtttggttaccagatcaacataaagttattaaaagtaaatatagttatatggccatgcttgcatgtacatttacaggtgtatatctagttggctcgttcccatcagaattacaaaatacatatggtacttggaatgcggatttattctatacattaggtcaaacgtgtttaatgttaattgctggtatatatagcttggcaacatttaaagaaaaaaagagtacaatacttaatattttatctattgtgattggtttgagtacttcgattccgatggcagcaacaacaattcttgccccacttcaaattgacggattaggaaagattatttctattgtggttgtaatcggtgtgattgttcttttcgctacattatctattaaaaagaatttattagttaaatactcaagaattaatattttaatgttcattattacgtctatcgctttatttactactatttctacatatgataatagtatggttgatatgactaagatacttccatttcaaggaatgttaaatgtagaaccttggcaagaattattagtgaatccatattggtggtactttgaagcaactgtagtttcctggtctgttttctgtggtagatttgttgcatattgcagtaatggttattcaattaaaaatatattaaaatatggaacattctcattaatcgctcttactgtagtttggcacttagtgtcagctgcaactggatatactctatctttctcaagaggccccgcaatttatgttttaacagcattaacaatgctagcatttgcggttacatcgttagattcagctactaagactttagttaatgatatggttagattgcttgaagaaaaagaaaataaaaaagatgatattagcactaagaaagttatggattttgttacatatgcaacaatgggcatcttgggggggttaaatattattcttttagtgactggattcccaagattatttacaattgtattatgtttaatatttgttccatttttcatacgtgcaatggtatattcatttgaatttgcatttggaaaagttgactattcaaaatcaggaacaattactgaagaagaatataacttgataaatagtgtagaataacataaacttattaactatgtaaaaacacctctgattattttggagaaaaagcgcaggtgctcatactgcgtgagcaactatgatgcgctttaagactccatgtgttcgcgaagcgcgaagcagcaccactctaaatggacttaattatggattcaatgtgggatatgaaggtatcaaggaaccgcttagcggtggctttgacccttgtccttgatattttcagagtctacatggcataatttgcaagttccaattagggtatggagctaatcatcatattgacagtgctcaattgcgtatcgggtgagctcagcatccgaaataatcacacctccactaaattgcctattttaaaacaatttggtggaggtgtttgttttaataaagaaataaaaaatgtaaattagtttacataatatcaaaaaagatttcgtgtatatacttttttcgtcgggactattaagcactccgtttttattgtatgtcctataatgagtatagcatacatttgtgtgactattattataggaggtcgataaccattggctgattatcaaaaaattctgaggttgaaaagcctcaagtattcgcaaactaatatcgcggccagtgtccattgttcacgtgtatattccacttaatctgactattcggtctgtaaaattggaaacctgtaatccggcttaaggaaaccacttacttttgcttgtctactgttttgctgatttaacatttattgtcaagcccttgccgtataagcagtgcaaagcaggcttgattataaatgttaaatctgcaaccctaaccaagacagaagcaaattgattgttcacggtttccagcgaccggacagctgatgtaacgacatccggaatattcctctgtattgtgacttcaagaatcgcaatacagaggcatgtgttgtgtattaatctcttttaaacaagtctcttgtgtagactttctcagttacatcgtctaagcaactatcatatctatttgcaataattgcttgtgacattttcttgaatttctttaagttatttacaaccttgcttccgaagaatgtactgttatcttccagtgttggttcatacacgataacagttgcgccttttgcttttaagcgtttcatgacaccttgaatagaagactggcggaagttatcggagttggacttcattgtgagtctatatactccaattatacattctttttcttgatcagcagagtaatccccatggttataataatcatagtatcctgcaatatttaatacacggtctgcaatgaagtcttttcgtgttctgttagactcaacaatcgcagacatcatgttctgtggtacatcgttatagtttgccaatagctgttttgtatcttttggcaggcagtaaccgccgtatccgaaggatgggttgttgtagtgcattccaatgcgtggatctaaacatacgccgttgatgatatccatagtgttaagatttttcatctctgcgtatgtatcgagctcattgaagtaactaacacgaagtgcaaggtaagtgttggcgaagagttttacagcctcggcttctgtgaatcccatgaagagagtatctacatttgtcttaatagcaccttcttgaagtaatgctgcaaatgtatgggatgctttaactagtttttcgtcgttttcatctgtggatacgataatacgtgatggatataggttatcatataacgcttttgattcacgaaggaattcagggctaaagatgatattatttgtgttgtatcttttacgtacagaagcggtatatccaactggaatggtggacttgatgactataatagcttctggatttacttttaatacaagttcaataactgcctccactgcggaagtatcgaagtagttttttttagaatcatagttggttggtgctgcgattatgacgaaatcagcatttttataggcttcgttgccttctaatgtagcagttaaatctaatttttttgtggtgaggtactcttcaatataatcatcctggattggtgatttcttattattaatcatctcaactttttcaggaacaatatctactgcagttacgtgattatgctgtgctaataatgtagcaatagaaagtcctacatatccagttccagcaactgcgatatttaatggagagcaagactctaagccagtatcgtttgcttcgtctgcgaacatatctattggttcgaagccaagcgtatctcccaatacttctaattgttgaatggatggaatatagtctaatgattccagacggctgatcatggcacggttgattccggtcatgtctgcaagttgttgttgtgttaatacacgttctttacgagcatctactattgttttggctaatagatcctgagataatttcttcataataatcgtcctttcttgcacgaaagatatgttattttaaatatcatatgttgtacatttgtcataaaatcaaaaacatattcattatagcagtcttgttatgaaatgcaagtaaaaatgacaaaatggcagtaattcttttgaagactgataaaaaatggataacgatgatgttttgaataacaaaaatgtaaaaagtgtaaggatatagtatgttttagaaattgtatcgtataagttgcgaatgaatatggtagtttttatatttttgtgttaaaatatctgttgatatgtttggaaaaagtgagttaaagtgagtttagtgttttgaggaaattgaaaaaatatatattaccaaaacgtagatatgagattttagcaattgacattggaattttggttatggtttattttgctacggtgttgttaatgatgttgcagattggttccatgcaagtagaaggaaggtttacatttgccaagttggtgttgtttgcagtgtgtgtgtttgtaacacgtattgaagtgggtgtatatcgcaatatttggcgttatgataaagtgaacgtgtacattcatcttgttgctgcggatgctatcggaggtatgctgttctacgtgatgggaagacttgtaacttctcttcgccttggatttgcagttagtgttgtaatgacaatggggcttgtgattgttacgttgctgagccgttttatatatcacaaacatatgctcattatggagttgtggacgacaataagttcgaacacgatatacataagattgatgtggcaattgttggtgctggaaatgttgatgccggacttgcggatgagttgctacgtaatctaaagtctcattacgttccatattgttttattgatcgagatttacaaaagattgattatggaatcaatgatttgcctgttataccggaagatgagaatattattgagcgtattaaggaattgctggtataggaaatcgtaattgcacttccagatgcgagtccagaggatcgtgagcgtctgttccacctatacaagcagacaaattgtaaagtgaagatatatgattatctatgggataatgaaggaaagcatgaaaatgaaaagcgtcagttctgtgagtttaagattgaagatcttctgtaccgtgaaagtattgctgtaaatagtgagaaaacaagaaatttctatacaggcaaaagtgtccttgtaactggtggtagtattggttcggaattatgcagacagattgcagcgttagagccaaaacaactgacaatcgtagacatttatgaaaataatgtttacgacgtgcagcaggagttaattcgaaagtacggtaataagctgaaaatgcgtatatatatagcgtcagtacgtgatgtaaagcgtatggaagagatttttcgtgaagtgaagcctgagatggtattccatgcagctgcccacaagcatgtaccactgatggaagcgagtggctgtgaggcaatcaagaataacgtcatgggtacgtacaataaggcaaatcttgctgaaaaatatggtgtggagaagttcttattgatttctacagataaggtagtgaatccgacgaatattatgggtgtgagattaaaaacatcttgttgaataaaaagacagctttgatgcctaacatttttacaaacaatccagtgtgtgaacttggaattacatttttgtatgaaggaaaaaagtatgcgtacaattttaaatacaatgatgaaaaagaagaatacatttatgataaattcattgaaattgaaaaagatcaatatggaacgagcgagagattacatgatttttaaaagatgtaagttctgatgaattcgtttgtatagatgaaggtgtatgccagatagtatagggtgaaaatgcttatttgtttagtgttttcacctttttatatataataaaatgctgtaaataaaaataagcggtttctattttatagaataataatgatagttatgttattcttttaataaaggtggtacatcatcacatattaataatgctttacttgttaatgctgatcatgtttttttgtattataagtttatgactcatgatatgtataatcgagcaatggcagttattatgaaaaataatataccttttgattatattccctatacaaatcttgaaaaatcagaacaggttatttatcaagtattatctcaagataaataaagttatgacaaatatctacttgatttatgacgagttgtatttgtaacttttgtctatttatggtaaagtatgtatgtttagaaaggggatatgagttatgaataaatatcttgaatatataaaaacatcacttttagcaaagataacattagctttgttagtcatagttgctttattaggtatctattgtatgacacaaatatatatctatttaccaacccaaatatttgttatgggagtcgtggtttttatagtcatacttgcattattatggcttactcattataaagtacctaaagtgagtgctgttgtagaggtgcttgtatgtggctgtttgatagctggtgtttttgcgacaaataaagtgaatacatttactaaaaaagtaaccgaaacaaaagaagttgaaacagtacagattgtggcattgaaagattctaaaattacaaaagatcaatcattcaataaattgacaatggcttatctacaagaagataataatgcttatacacgttcttcagaaatcttaaaagacaacaagaaaaaagtaaaaaaagaaaaaccatataagaatatggaattagcatataaggatttaaaaaatcataaagttgatttattggttttaacgaatttaagtaagagtgatttatcatcagttgaagaaaattatcctgatcaaatcaaagttattttatctaaagattacgctttagaaagtgccaaggccaaaagtgtcaatatttctaaagaaccatttacaatttatttccagggagctgatttatcttcaggcgataatattaattccgtaggtagaggcgatgtcaatattttattaactgtgaatcccaatactaaaaaggtaaatatgcaagttattccaagagatttatttgtttatattccttgtaaagatgcaagcagtaaattatcttatagtggatggtggggaggtattcaatcttccattgcaagtattgaaaaagctttagatgttgaaattaattattatgctaagattaattttgatggcttaactgatttagtagatgcattaggtggtgttaaagtatacagtcattatacatatagtgcaggtggatataactttgtaaaaggttataatgaagttgatggtcctaaagctttaatgtttgctcgagcaagaaagatgcttccattaaatgaaagatcacgtggatatcaacaaatggaattaatcaaaggtatttttacgaagtttgcacaagaaccaacttataatcatgcaatgagtgtcattgattcattagaaaataattttacaacaaaccttcctaaagaagattttgtaaaggcatatcaattagtggttgaactattacctaaacttcaaacaatggaaaatcattctattgaaggtgaatataaatggcatcatgatgaagttaattcaaactatttatattatttctatccaaataagggtgaattaaaagctgtaaaagaaagaattgatagtgttttaaatggtcagtaaggaatgaataagtcattcctttttttcttaagaaattattaagatttattatcttgatatcaaatgaaaataagtttataatgcaagtcaagtaggagggtgattaaaatgaatcctaaagtaaaagtaagattaagaatattagctatattaacaacattgatatggatgatagttatttttagattttcaatggataccggaacgtcttcacatgaattaagtgatttgtgtgttcgaatatttaataaagcagtctattctttcacaggtaaagatttaacaatatctattacgcctgaacactatgcacttattgagttgttttttagaaaattagcgcatatgagtatttattttgttttgagtattaatgtcatgattgttttatttactttcaatataaaaatgtcattaagaatgtttatttcagcattattctgctttttatatgctttgagtgatgaatttcatcaaatgtttgttgatggtagaggagcaagttttactgattgtctcattgatacttcaggcgctttattaggtattatagcagcacttattttatattgtattttatatacattgatgacaaaatatcaaaaaagaaaagggcttattaaaggagcctatgattaagctttgaagatgtggtaaatgacatttacttcatccttttgttttataagggtatttatcagaaaaagaacgtcaatgaattaagaaatttgtgaatgttttatggtgaaactaagagtagtcaaagaaaggtgtatcattataaaataagactttaaacatgagagtgctttattatttcttctctcacaaagataatgtttatttaatgaattaaatgtgagataaagaaacaatcttatatcaaaatcgaatatccattatataatctctttaaaagaaatgaagaataaaaatgttgaattacaaaaaaacttgaccattcctaataggaatggtttaatttttttaggatgtgatggatatggataaatattataaaacaggtgaatttgcaaaaatggcaaatctttctataagaacaattcgatactatgataaaataggactattaaagccatctaagattgccgataatggctatcgtatgtatagtgatagagattttatgaaattacagaaaatattatctttaaaatatttaggtttttctttagatgatatcttttctatgactgtaaatgatagttatttatctttacaacaatctttatccttacaaaagaaaatgattgatcaaaaaattgaacaattacaaaatattaaattatcattagaaaaaacagagcaatttataacgcaaagtcaaaatattgattggaaagcaatattagataatatcaattttaatactatggaacaggatttattagaacaatataagaactcaacaaacattaatattcgtattaaattacatgaaaaatattcaataaatccaattcattggtttgaatggatgttttcacaatatcacttagataatggaatgaaagttttagaaataggttgtggaaatggagaactttggcaacgaaatcaaaaaaatattccaaatatccaattaactttaactgatatatcccaaggtatgttagatgatgcaaaaaatcgtttaaaagatataaaagatatagattatcaatgttttgattgtcatcaaataccttatgacaatcaaacatttgatattgttattgcaaatcatgttttattttatgtacaagacattgaacaagttttaaaagaaattaatcgggttttaaaaaatgatggtattttttattgtagtacgtatggaaaaaaacatatgaaagaaattacggatttgattaaagagtttaatcctaaaattactttatctaatattaaattatatgatgtatttgggttagaaaatggaaaaataattttagaaccatattttaaaaaaatagagactttgattcatgatgactatttattagtcaatgatgttaatgatatcattaactatattttatcttgtcatgggaaccagagcgaatttattttaaaagattatgaatcttttaaaaaatatatggagaagaaagtaaaaaatgaaattaaaatcacaaaagctgcaggaatctttatttgtcgaaaataagtgttgaccatgacgttacgtcatggtttatattttagttataatcaaaatggaggttttactatgaagggaattatattggcaggcggaagtgggacacgtttatatcctttgactcaagtaacaagtaaacaattgttaccaatttatgataaaccgatgatctactatccattaagtattttgatgaatgcgggcatcaaagatattttaattatctcaaccccagatgatacacctagatttcaagaattattaggtgatggaaagcaatttggaattcatttacaatataaagttcaaccatctcctgatggtttagctcaagcttttattttaggtgaagaatttattaatggggatagttgtgcaatgattttaggagataatatcttccatggtcatggtttaacaaaacgtttgcgtgatgcagcaaataagaaaacaggagcaactgtttttggatattatgttgatgatcctgaaagatttggggttgttgaatttgataaagatggtaaggctatttcaattgaagaaaaaccagaacatccaaaatcaaattatgcagttacagggttatacttctatgatgaaaaggttgttgagtatgcaaagagtattcaacctagtgctagaggtgaattggaaatcactgatttaaatagaatctatttagaaaaaggtgatttggaagtgactttattaggacaaggatttacttggttagatactgggacacatgagtcattagtagatgcaacaaactttgtaaaaacagtcgaaacgcattctaatagaaagattgcatgtttagaagaaatcgcttatgataatcattggatttctaaagaagatttagaaaaagcttgtgaattatataagaaaaaccaatatggtaaatatttaaaagatgttttagaagggaagtatatagattaatgaaagttattcaaacaaaaattccaggagtattgattattgaaactgatgtttttggtgatcatcgtggttattttaccgaaacatattctaaaccgaaatatgagaaattaggaatcactgttgattttgttcaagataatatgtcttttagtgcacaaaaaggaacattaagaggattacattggcaaaatcctccttatgcacaatcaaagttagtctcatgtacaaaaggaaaagttattgatgttgctgtggatattagaaaaggaagtccaacatatggagaatgggtatctgttgaattaagtgcagaaaatcatcgtcaattctttattcctcaaggctttgctcatggatttttaacattaactgatgatgtggagtttagatataaagtagataatgtttataacaaagaatctgaaggtgggatgcgttatgatgatccaacagctaatgttgattggggtggattattaaatggtattgaacctgttttaagtgaaaaagatatgacaggaccaactttagaggaatcaaataatcaatttgtatatgaaggagataagtaatatgaaaattttagttacaggtggagcaggatttattggtggaaattttgttcattatatggttaataaatatccagaagatatgattgtaaatttagatttattgacttatgcaggaaatttggagacatgtaaacctgtcgaaggaaaaccaaattataaatttgtcaaaggtgatattgctgatagaaagtttatctttgatttgtttgaaaaagaaaaatttgatgttgttgtgaactttgctgctgaatctcatgtggatagaagtattgaagatcctgaaagttttgtaagaacaaatgttatgggaacaacaactttattggatgcatgtaataaatatggtattcaaagatatcatcaagtatctactgatgaagtttatggtgatttaccattagatagaccagacttattctttacagaaacaacaccattacatacatctagtccatatagttcatcaaaagcatcagcggatttatttgtgttggcttattatagaacatatggattgccagtaacaatctctagatgttcaaataactatggaccatatcatttcccagaaaaattaattccattaatgatttcaagagcattggctgatgagtcattaccagtttatggtactggggaaaacgtgagagattggttacatgtttatgatcattgtgtagctattgatttgattgttagaaatggtaaagttggtgaagtttataatgttggtggacataatgaacgaacaaacttagaagttgtaaaaacaatcttaaaagctttagacaaacctgaatcattaattaagtttgttgaagatcgtaaaggtcatgatagaagatacgctattgatccacataaattagaaactgaacttggatggaaaccaaaatataattttgatactggaatccaacaaacaattaagtggtatctcgataacaaagaatggtggcaaaatattctttctggagaatatcaaaactatttccaaaaaatgtatgttgaaaaaggtagagttgaagaataaaaagtaaaaccccatctatgatggggtttcttagaaaggaaagcatatgaaaatattagttacaggtgtaaaaggtcaattaggttatgatattgttaatgagtgtcaaaaaagaaatattgaagccattggtgtagatattgaggaaatggatattactaatgctacacaagtttgtgatgtcattacgcaagctaaagtagatgctgttatacattgcgctgcttggacagcagtagataaagcagaagatgaagttgatatgtgtcgaagggtaaatagagatggaactgaaaatattgcacgcgtatgtgaagcattagatttaccattaatgtatttttctactgattatgtttttaatggtcaaggagaaatgccatgtaaagaatatgattttagagagccattgaatgtttatggacaaacaaagtatgaaggtgaattaattgttgaaaagttaaaaaaacactttataattcgtatttcatgggtatttggattaaatggaaataactttattaaaacaatgctacgtctaggtaaagaaagaggagaggtttcagtggtaaatgatcaaattggctctcctacatatacgtatgatttagcaaaattatgtgttgacatgattcaaactcaagagtatggaacatatcatgcatctaatgaaggatattgttcttggtatgattttgcatgtgaaatttttaaacaagcacatatgaatgtaaaggtaactccagtagattcaaatgcttttcctgcaaaagctaaaagaccatctaacagtcgaatgagtaaagatgaattagataaacatggatttaagagattgcctacatggcaagacgcattggaaagatatttaaaagagataaataatttgtgatatttatacagatagagtataataattttattaagggtggggaaaatatgaaaaaaattttaaaattgatgttatcattgattataactagttgtttgttatcttatggaggaacaagcgtttacgcacaagacaaaaagaaaaacaatgaaatttcaacagtatatgaggacagaaaaaatgaaaatgttgatgaacagattgttcaagaatcagcaaatagagggatgcaagaagcagaagagttaaaataccaacaatggctaaaatcaacaaataactttcctaaaacgaaatcagcgggtccttattgggaaggtagttcttcaaaaagatatttttatgatgcaaatggtaagcgatttggattaggtacatctaaaaaagttattgatgtttcaaagcatcaaggagtaattgattggaatgctgtgaaatcatcaaatcaagttgatggagcaattgttcgtttaggatatggatggtattctaatcaatatgatgagcaagctgcaagaaatataaaagaattaaatcgtttaggtataccatatggtgtttatttattcagttatgcgcaaaatgctaatgatgcaaagaaagaagcagatttctttgcgtcattaataaaaaaatataatgtaaaaaatacatacccaatttattatgatattgaaagttgggaatataaatctgatggaaaaacagttaagtctccttcgtcagtttcaacttacgaacaaataattagttcatttatgacacaaatgaagaataaaggatattcgactaaagtatatagttatagagcctatttacaaaaacaacttaagagccctagtattttgaagcatgttgattggattgctgcttatacagatacattgggatataccaattcttacaatcaaacaaatagtattggatggcaatatacatctagtggcagtattccaggaatcaaaacaagagttgacattagcgcatttgcaataaatcctaatcctttaataacataccaagcacatttgcaaaatagaggatggatatcaagtgtaaatgatggaattactgcgggcacaactggacaattcttacgattagagggaataaaaattatgttaaattcaggattatcaggaaatgttgagtatagtgcacatgtacaagatatcggttggcaaccatgggtaaaaaatggtcaattaagtggaacaactgaggaatgtaaaagaatcgaagcaattaaaataaaattaactggcgatataagtaaagattatgatgtatattatagagtacatagtcaagggtacggttggcttggatggactaaaaatgggagtatagcaggtactattgaagaatgttgcagagttgaagcagtacaaattatgttagtaggtaaagggttaccaatatcaggtagtacatctaactcagtatattatggacatccacttgtgagctacaggacacatattcaagatattggagatttacattatgttagtgatggagtaacaagtgggactaccggtaaagcattacgcattgagaatgtaaaaattgacatttcagaattgctgtctcaaagtggatatagtggaaatatttcttattcatcacatattcaacagattggctggctggattatgtaaataataattgtataagtggaacttttggaaaagcattacaacttgaagcaataaaaataaaattaactggtgagattgcaaattattatgacatatattatagaatgcatattcaaaatcatggctggactggttgggcaaaaaataatgcaatgtgtggttcaacagggcttctattaagaggagaagcaatagaaataaaaattctgccaaaaggtgcagaagttccaggtagtgtttccaatactttttatgagaaataaaaaaatttttatgaaaatagagtgtctactagaattaggattattaacttaagatgatgacagtatgagaaattgtgctgtcttttttagtttatagtgaatcaagattctaaaataatttgattttgatgataaataatgcataacaagataaaatagattattatattcaatcgttattttaataaatattactttgtgggaaatgattagagttaaaataaatatccaaaggactagattttaaaagttgatgaataaaattttgaataatcaactttcatttaatatggtaacagttttgagatgtttgattagttatattttaaaaagcattttataatatgtttatttgaaaagtattagtagtaaatattttataaaataagtactataaaacaatgactttaatatatgtgaaagattcatgcttagttcattattgtaaacttttacgaacatagaaaattcatgtggtttatatggatattctactatttttactattttttatcaagttttttaaagtttacttttaaaaacagatatcacataattatgacatggctgataaagctatatatgtttcatattgcttttatcacgtaaaatgttataatattaaaaaacatgacaacgattgacgaatattttaatatgtgttataaatgttgggaatgcgaagggagcaagtattatgagggaaaatatctatgctgtattattatttgttatagaattaattattttctatatttcatgtacaatattagatatttctaatcaattagctttaaaaattggaattctttggtttggtcttatttttatttttaaacattataaaattgaatcaactttggtttgggatgaaattcgaaatgatacaaaaacatttttagcattttgttttttgatacttgttattgattatccaaaaatatcattctattttagaatagtgctattaggttttataatgcttgttatttctattattttgaatagaatgctaagaatagttttgagaaaatatcttgcaagaagaacacttattgttgggactggtaatgatgcatatagagttgctagtatttcacataacaatagatttgctttaactgaagttattggttttattaaagttaagaacgagatacaagctttggaattaattaatcatgataaatttaaagtttatgattttgaaaatttagatagtattttaaaagaagaaaaaattgatcaagttattattgcaataccacaggcaacacgtgaacaaattgatactgtatctaaaaaattatttgggaaagtgcagattattaaagtattgcctgagctgaattttacaatgacgtttaactcaaaaatcaatgattttgatggtgagttattaatatctacatcacgagggaagcttgggtttgtagaaaatattataaagcgtctagtagatatttgtgctggacttgcaggatgtttattattaataccattaacattatatgtatcacataaaaataaaaaaaatggtgatactgatccaatattttttaaacaagaaagaattggattacatggaaagccaatatacatatataaatataggtcaatggttcctaatgcagaggcagttttagaggaattaatgaataatgatccagctataagagaggaatatctaacaaataaaaagattgtaaatgatccacggataactgaagtaggaaattttttaagaaaaacatctctagatgagtttccacagttttggaatgtattaaagggtgaaatgagtttggttggaccgaggccatatttacctagagagaaagacgatatggatatttattatgattcagtcatagaatgtaaacctggtattacgggaatgtggcaagcaaatggtcgcagtgatgtaggttttgaagatagatgtaaattagatgattattattatcgcaattggtctttaggattagatttgattattatttataaaacagttaaaagtgtattttatggtaaaggtgctttatagcatgtctttagcaaaatatattcattgaggaaaggatatttatatgaaaattacagtagcaggaacaggatatgttggattaagtatagcaacattattagcacaaaataatgaagttattgctatagatattattaaagaaaaagttgatatgattaacaatcatatttctccaattaaagataaagaaattgaggaatttttaaaagataaaaaattaaatttattggcaactttagatagtgaaattgcatatactggtgctgattatataattgttgcagcaccaacaaattatgatgatactacgaatcaatttgatacaagtgctgttgaaagtgttattaaagaagctattaaatataataatgatgcaacaatagttattaaatctactattcctgttggatatactcaattagtgaataaaaaatttaataccaatcgtattatattttctcctgaatttttaagagaaggaaaagctttgtatgataatctttatccttcaaggattgtagttggagagcaaagtaatagagcaagaatatttgcaaatttattaaaagaagctgctttcaaacaagaaataccaatattactcactaattctacagaagcagaagcaattaaactatttgctaatacatatcttgctttaagagttgcatattttaatgaattggatacatattgtgaaattaagaatttaaatactaaacaaattattgaaggtattggtttggatccgagaataggaaatcattataataatccatcatttggatatggtggatattgtttacctaaagatactaaacaactaaaagctaattataaagacgtacctgaaaatttgataagtgcaattgtgttaagcaatgaaactagaaaaaaacatatttctgatatgattattgaaaaaaaacctaatgttgttggaatatatagattaactatgaaaatgggatcagataattttagagctagtgctatccaagatgttatgaaaaatattagagcagaaggaatagacataattatttatgaacctactttaaaaaaagaaacattctttaaatataaaatagtgaatgatttcgaaaaatttaaagaaatgagcgatgtaatagttgttaatagaatggattctgaacttgctgatataaaagaaaaagtgtatacaagggatttatatgaaagagactaaaaaaaatatatgttttatatcatcttctggtgggcattatgaacaattactaatgttaaaaccattaatggaagaatacaactcttttattgtaactgagaaaacaagttactcaacaaaagtagatagtataaaaatgtactatataaagcaagtgaatcgtaaggaatttagttttatttttgccatgatattcaacacaatcaaatcacttttgatctttttaaaagaaaaaccagatgtagttattagtacaggtgttctagcaaccattccaatgtgtattttaagtaaaatttttaaaagaaaattaatatatattgaatcatttgcaaaagttacatctccaacagaaacaggaaaattaatttataagtttgctgatcaattctatgttcaatgggaaagtatgcttgatatttatccaaatgccatttatatcggaggaatttactaatgatttttgttacagtaggatcacaaaaatttcaatttaatagattgttaaaggaaattgataggcttgtaaaaaataatataattaaagaagatgtatttgctcaaattggatatagtgactatagaccaagttattataaatataaacaatttttagatagaaaagagttctttgaattagaaaaaagtgccgatattgttattacccatggtggaactggtgcaattattggagcattaaagaatgaaaagaaagtaattgctgtgcctagattattaaaatatggggaacacgttgacaatcatcaattacaagtattatctcaatttgaagaaatgaatttaattattgtatgtaaagatattgatgatttgggggatgcatacttatctatcaggaaaaagaattttctaaaatatgaatcaaatacggacaaaattttaaataatattcgtaaatttattgaacttaagaggtgattttataatgaatagagcaaatttaatgattaaaatgaaatatgctttacgttttttaccagatttaatttatataaaattatatttcaggttaactttgaaaagagaacttgatttgaaaaatccaataactttaaatgaaaaacttcaatggatgaagttcaatgataggaatcccatgtatacaatggtttctgataaattggcggttcgtccttatatagaacaagtaattggaaaagagtatttagtaccattattaggaaaatgggataactttgatgatatagattttaacacgctaccacgtcaatttgtattaaaatgtaatcacgactctggtggattagttttgtgtaaaaataaagatcaattaaacattaaggcagctaaaagaaaaattaatgagagtctgagaagacaattttattatatcggtagagaatggcaatataaagcaataaaacctactatatttgcagaagctcttttactagatgaggatggaaatccgcctgctgattataaaattagttgcttcaatggcgagattgacaatattatggtatgtattgatcgttttacagagagcggagttaaattttatttttttgataaagactggaattttttgagatataataaagatgatgataaactcccagctgattttactattaaaaaaccagataatttaaacgagatgttagaaatcgcaagaaaactatcaaaaccttttaattttgctagaattgatttatataacatcaaaggaaaaatttattttagtgagattactttatcccctaattctgggtttgacactgatataacatatgaaacagatttattactaggcgagaagttacatattccatatgctttttaatatttgagaatctatcatataatataaaaaggagtttatgatgaaaaaaattttaattattaatacaattggtatggggtacgaagggattagtactgttatttttaattacttagagcatatggataggaatgattttgatttccatttcccaatattccaagatactaatactgaaattatttctaaaattaggtcactcggagtaccacatatgatttcaaatcgtaaacaaaatcttattaattatttgttatctataaatgaaattttgaaagaagggtatgatgttgttcatattcatggaaatagtggtacaatgcttttcgaagttttaatttcaaaaattaatagagtaaaaaaaattatagtccattgtcataatacaaaaacagatcatcctttcttaaatgctattcttaaaaaaccaatgatatatttttctgatgaattacttgcttgttcaaaaatatcaggtgattggttgtatggaaaccattcatatattgttttaaaaaatgcaataaatataaaaaaatttatatataatgcagaaaaaagaaaaataattagagaatcatttggatttaaatctgaagattttgttattggacatgttgggcattttacaaaacaaaaaaatcatacttttttgattgatatcttttcggaaattcataagcaaaaaggaaatgtaaaattattgttagttagtgatgggcctttagaaaaagcaataagagataaaattgattatttaaatttatcaaaatatgttgtatttgcgggtagaagaaatgatgtatgtgatatctataatgcaatggactttttcataattccttctttatgggaaggactatctttagtaactttagaagcacaaacaaatggactacaagttttagcttctaaggctattcctgaggaagtaaaatgcacaaataaaatatactatgcttccgtagatgaaaatccaaaaatatgggctgaaaaattttttgaaataatttcaagtaataaagcagattctagatttgaaaaaatggataattatataaaaaataataatttcgatattgaattagaaagtgataaattgaaatcaatttataataactaagagtttaggagagtatattttatgaaaatagcggtacttatgtcaacatataatggtgaaaagtatttatcaaaacaattggaaagtcttgcaaatcaaacagtaaaagattgtattacattatatataagagatgatggaagtatagataaaacgattgatattattaaattttggggagaaaaaataaaaatatgtttgtatagaaattcaaatttaggaccagctagaagtttttgggaattattaactaataaagatattacagcggattattatgcgttttgcgatcaagatgatatttgggatagtaataaattagaggtagctatcacgcaattagagcaagagcatgctcaattatttctaagtaattgtagattaattgatagttcagatgaagttattgaagatagatatagaataaattttccagatatgtcacttaaccgacaatttatttctggttttgctcaaggatgctgtatggtttttacaaatagtcttagagagtattttttaaaaaataaaattgaatgtattcctatgcatgatacagtggttattattcacgctataaagtttggaaaaataatttgggagtctaaaccgatgtttagttacagaattcattctaataatgtagtagcaaaatcaaataaaaatattttaaaaaatcttaaaaatacatatttgaattggaaaaatagcagtgagcattcaatgtctaaagtagcaaatgaagtgttattatactgtaataatttgaatgatgaagaaattgaatatttaaatctagtaaagaattataaaagaaattttaaatcacaatgtaaacttatacatgaatctaattttgagaatgtaccatcttcccatgttagatcatttgttataagagtattgttaaaactattatgatggggggatgcaaatggataatatagataagagaaaagtatatctatatggtatattgttaataactctttatttttcttcaaagatgctatgggatagttttactattttatttgaattaatctccttatttataattggtgcttttgctttaatagaaattagaaatacttttattagaggaaagaatgaacaaaaagtgcttttatttttatggattgtatatattatatatgtaattttaaatgggttattaaatgattttaatatttcttgttttattagatctttgtatgagtactgcttttattcttgtattttatggtttgcaatattattttcaaattacattgacttgaaaatagttataaaatggttaagttatattggaattattttagctcttttatcgttttgtgaatttattttcaaatttcactttattgaaggaatgtttagtaattatctaacttatgataatatagaagtcgttagagcaaaggtttttacgagatcatatctttctcatggagttttattaggaatcttttcaatttgtaatgcttatagttataaaatatctagaaatagggtatttgcaataggtgcagctttatgtttcttttcaattttagcaaccggatctcgaggaccattagttgctacgtttattgcttatggtgtatttatcatattagaaaacaagaaaaaaatcaaaaaaaatatatctcaactttttacaattaaattgaaaagaaaatattatattattttaatagtcttattaatttttattatacttatcatttttaacatttcaacaggcatttattttatagattatagtatagtaagaattagaagtatttttaattggactggtgatgcaggaaatttaggacgtttaaaaatttgggaagaaagtttaaatataataaaagacaattttatttttggaataggtgcttctaaaactggttcgtggggttctgcatcattaatggttactgaatctgattatttaaagaaattaattgaaattggaattgttggtacaattatttactatagtatacctatttatgtgatttataaattttttaaatcagaaaacaaggattcatcaaatacactaatttcaataattattttaatattagttgatagtgttattttgcaggttactgaagaaataatgattgccttcttttattggctttcactagggtttctattttctaatttgcaaagaaaaggaaagatgaatattttatattattctaatgtggattggtattggataaagcaacgtcctcattttattgctgaaggattagctagaacatacaatgtaaaatttgtgtatcagcatagatataatagatcaattatgcaaaaaagcagagagcaatctattgtaaaaaaagtatatccaatatatgtaatacctaaaggagatagagtaaaaattttatataaaattaataatataataagaagattatatatcagtttatatatttctatatgggatattgatacaatcatattaacctatccaacacaaattaacagtataccaaattgttttacagttcgtattttgtatgattgcatggataattatattgaatttattactgataaaaacgaaaaacaagagctagcattagttgaaaatatattaattaataaagctgatctaattactgtttctagtgaaaaattaattgaagaacttaaaataagacaccaaaatttgccttctgaaaaatgttttttagttagaaatgcatatgctggagaaattataaataatacacatactgtaaaagtgaattcaatttataagttatgttattatggaacgatttcctcttggtttgattttgatttattaaaaaaaagtttagataaatatagaaatattgagtattttatttatggaccagttgaacctggaatagaaatgcctacaaatttagaaagatttaattatatgggaatagcagaacatagtagattatcagaaattgtagaatcaatggactgtctaattatgcctttcgttgtaaatgagttgatagaaagtgttgatcctgttaaattatatgaatatataaattttaataagaatattatctctgtttattataacgaaataaatagatttaagccatatgtctatttctataaaaatgaaagtgaatactatgcaattcttgattctttattaaaaaataatctaataaaatattctaatgatgaacgaatagattttttagaaaaaaataattgggattcaagaatacaacaatatgtaagtttattagagcaatcagaaagagaggaattataatgaagaaaataatgttagtttttggaactagaccagaggcaattaaaatgtgtccgttggtaaaagaacttgaaaagagaagtaatattgaaacaattgtctgtgttactggacaacaccgccaaatgttagatcaagttttaaaagcatttgatgttttcccaaaatatgatttatcaattatgaaggaaaatcaaacactatttgatgtaacaacaaatattttgaatagtataaaaaccgttttagaaaaagaaaagccaaatgtagtcttagtccacggcgatacttctactacttttgcaactgctttagcatgcttttatttgcaaattcctgtaggtcatgtagaagcaggattgcgaacatatgatatatattcgccatatcctgaagaatttaatagacaagcagttggaattgttgcaaaatataattttgcgccaacaaatatgagtaaacaaaatctattaaatgagggtaaaagcgaagatactatttatgttacaggaaatacagcaattgatgcattaaaaacaactgtaaaaaaagactatacacatccagaattggaatgggcaagtgattcaaaatttattatgttaactgctcatagaagagaaaatcttggtgaacctatgcatcatatgtttagagccattaagagaattgttgatgaacatagagatgtaaaagtaatctatccaattcatatgaatccagttgttagaaatgctgcaaatcaggaattaggtaatcatgatagagtacatattatagagccattagatgttttagatttccataattttttagcaagaagctatttaatattaactgatagcggtggaatacaagaagaagcaccatcattaggcaagccagttctagttatgagagatacaacagaaagacctgaagggatagaagcagggactttaaaacttgtaggaacgaatgaggaaacaatttattataattttaaattgctattagaagatgaagaagagtataaaaaaatgtctcaagcttccaatccttatggggatgggactgcttgtaaacaaattgctgatattttagaaaataattaggttttttaatatttgtactcattattaataaaaatacttttaaagtttataactagtttgatatcataggtttttcttgttttatttattgttttctaacatttatgagaggagataggcatgcattattttggaaaaattaaaaatatcatcaatgaaaaagggggtattttctttgttacatatatatttaaaagacttgttttaatggttggaaatcattttttttggagcagtaataaacgagcaattattaatgcaaccaaaaacaaacaagttatcattatcaataaaactattgaatggaattatgcattccaaagaacccaacaattagccacacaattttcaaaaaaaccagatttttgtgtgatttatgtaactgagccaactgtctattatgattattttattaatatagataagataaatgatcatttattttgtttttcgtataaacattacttactattagatgaattattatcaacatctaaatcaagaattttgtatattacaaatttattaaactatgaaaatgatataaaaatttcatatgataaaatggtatatgaatatattgatgaattatctttatggtttaaagatgacatgaataaaggtttagaattacataaaaaagctataagagatgctgatttaattgttgcaactgcaacaaaattatatgaggaaactcaaaaaattacagataaggtaatactatgcgaaaacgctggagattatgattttttttctaaaattgacacatataaaagcaatgaattaatctctaaaatttcagcaaagtatgattgtatccttggatattatgggatgctggctgaatggtttgattttgatttaataaaagaaattgctaggaaacataataattgggcatgggtgctaattggacctacttatcctaattatgatttatcacaaaataaattagaaaattatgataatatctatattttgggtgctaaaccatatactgatttaccaacatatatcaaaaagataaatattttgaccataccatttaaactaaatgatattactgcttctacttctccagtaaaattatttgaatatatggctgctaataaaccaataataacatctaatatgaaggaatgtagaaggtacaagtctgttaatatatatcagacaactgatcaatttgaagtaatagttgagaaaattatgaatatgacaagtgacgaaagtaaggaatatgttaaaatactagaaaaagatgcaaaagataatacttgggaaaaaagagctgatatgataattgattatttaaatttgtactaagtctactatttgaggagatataaaatgaaatgtacactagttatattaaattataatgatgctaatagagctttagaattagcaatgaaatgcaaggattatcaatcaatagataaagtagttattgtaaataatggtagcacagatgattcacttatttatttacaagataacttaaaaaatattgaaaatgtcatattattgaattcgggaaaaaatggtgggtttgcatacggaaacaatattggcgcaaaatatatttatcaacatttattttctaaatatattttatttgcaaatactgatacaatttttacaaataaaagtatagaaaaatgtttaatatatttagaaaatgatttgaatttaggtttggtttctatgcgtattaaaaatatgggaaatcatgaagaaatttcttgttgggataaaagaaaatatttagattattttttagcaaatttttatttttatagaacatatataaagcctccattagaaaattcaatattgacacaaccaaattttcaatatgttgatcatgttcgcgggagttttatgcttttcaatttaagtattttaaaagacattaatttttttgacgaaaacacttttttgtattttgaagaagaaataatttcagaaaaattaaaagagaagaattataaaattggtatcataactgatgaattttatattcataatcatatcggtttaaataattcaaattatttagataaatatttttataattcattatattattatcttaaaacttactgtaaaatcgggaatattaagatttttatattaaaagttgctgtattattcaaagactttgaattgaaatacataattagtccattaaaacaaattaagaaaattttgaaaaatattttaaaattaaaataaaatatttattcttttcagaagaggtatctaatatgaaaaaatcattaaaagcaaatgcggtattatcaatgcttaaaacaataatgtcattaataacacctataattactttcccttatgtttcccgaatacttcaagtagaagcattaggaaaatataatttttctttatcaattgttagctatttcattttactggctgagcttgggataaacacatatgctattagagaaggtgctaagataagaaataatagggatgaatttgagaattttgctaatgaaataacctcaattaatattttttcaatgataatttcctatttcttattatttttatttgttatatctttagataaaataagtaattatgcattgcttattttcatattaagtatacaaattgcattaaatacttttggacgaacatggatttataatgtatatgaagatttcataatattaactattactcaatgtgcaatgcaaatattttctgtaatattattatttttatttgtacattcacctcaggatatatatatatatgcaatgatatatattatttcttctgcttttgcaaatttgttttttggtatttattccaaaaaatatgtgaaatttcgattaagaatatctataaatatattaaaaaaacacatttcacctgttttaatcattttttgcactactttagcctctaccttatatgtaaattctgatgtgacattattgggatggttaatcaatgatgaatgcgtaggattatattcaacagctgttaaaatatattctattgttaaacaggtgattattgcattaataactgtagctataccacgtttaacactttatactggaacagaagaatttaaaactttatttgagaaagtatttcgtgtattgattagctttatatttcctgcaatggttggtctttttatgatgagcaaagaaactattttaataattgctggtcctgaatatttaggtgctacaatttctttacaaatattaagtatttctcttcttttttcacttcttgcttgtttatttggtacaggcgtattgataccatataatgaggaaaaatattttctgaaagctacattgataagtgcatttattaatgtaatattgaatttatttcttattccaatgtttaaacaagatgcagctgcatttactacactaattgctgaaattgttattttctttttatgtttactacagtctaaaaaatatattggtaaaatatcaataaaaagtatgtatccaatttttatgggatgtattagcattgttgtatattgtatgatagtaaaattttttaaattcagtttagtatatgaagtatgcttttgtgttttaggttcattaattttatatagtatagttcagatattatttaaaaatgaacaatatatatttattatatcttggacaattaatatggtaaaaaaattattttgactatctacaatctatagttaaaatgttgaattataacaaaaatagtgtttctatcgatttattcaaaattgaattatattagttttttatatccataaaatgatctaatgactttttactttttatatggtaattataattattatataatcaagcattttgaaaaaataaaaatgttgtatgggaagcaccagataaatccatgacaatgattttgacttttttcgttctttgaatgagaatctcataaaatagtttttcagataggaggcacgtctatcagtgataatattaagtgtttttccaacagtaggattcatttaccaaatgcaaaagtaccttcattagttttagcactaaattcattaatatagattgttgaagatgatggtagaatctcataagaatatctatacaaattgtaaaataatccacaggctgagcttttagaaagacactgagatctagcgagtacagccattgtagtattttctctgaaatataaaagacaagtttgggctgcgatagttgtcatcttgggatgagaaaatataaaagggatggtatattgcatttatatctaagtgatttcatgattggttattaagtatccgtttgaaatatgaaaaagaaaaattttttagtactttttaaatcataacaatttaaacgactacagtgaagataggatttctttattgaaaaaaacaatattaacatatttaatgatagagctattagattttttcctacatctgaagcaagaatcagaatggggggggaaggtaagggaataaaaatctcattaatagaatgtaaagaagtagaaaaagtttagacaataatgcctagtaagttcaaactttgtgaaattttaagtagtcaaagtatattaatattattttaaaagaacttaaaaaacttttatattagcaattacaatttttatgttttgagacacatctgtacaacacgatatatacagtgtaatgcagatataaaaaatcaaagtaaaatattaggagattcttttatgaatacaacgatatgtatgtatactcatcattttatcacaaaaagaagcaattaaataagttaagacctatgaaatattaggtgaaattgacaaattcttgaaaagtacacatgaatatgctaatattgtaacggttaaagaaaagagggataaaatggctaaaaaagctagtaatacagatagtattattcaaaaaattacatcttggaaagtaattattgcaattcaaattatagcttcattagtacttatagcgttattttttaaattaggtgcactaccaatgaaatatactttgataattattgcagtagttttattgttatgcgttggaacatttttattaatgaaaccttccgaaaatgaaaaaacagtaaaaaatattgtaggaaaagttatcagtttattattaagcgtagtacttttagtgggatcattatatattgctaaaggtaattcagtgttagataaaatttctggtgctaatactcaaacaacaagaatggttgttgttactttgaaagatagtaaatatgatgaattatctgatttaaagaatcaaacaattgaaattaataatgctgttgatgaagaaaacatgaaaaaagccatcactgaattaaataaagcagaatcttcaattaaaacaaaggatgttaaagattttgataaattagcaaatgatttatatagtggaaaaacacctgcaatattagttaatcaatcatattatgcagtgtttgaagcaaatcatgagaattttgaaaatgaaacaaaagaaatttggcattatgatatcacacaagaaatcaaagatatttctaaaaatgttgatgttactgaaagtttatttacaatttatattagtggaattgatacgtcaggacctgtttctacagtttcaagatcagatgttaatatgctagttactgttaatccgaaaacaaaacaaattttaatgacaagtattcctagagattattatgtaaccttagcaaataaaggtaaaaaggataagttaacacatgcaggtttggctggtgttgaaaattctgttaaaacaattgaaaatttcttaaatattgatgtcaattattatgcaagagttaatttcacatcattagttacaatggttgatgcattaggaggtattactgttgattcaccagttgcctttacaacaatgcatgggaattatcatattgttaaaggaagtaataatctaaatggtcaacaagccttaggatttgtaagagaacgttatggattagctaatggtgataatgatcgtgttaaaaatcaacaacgtgttttaacggctatgttaaagaaagcaatgtcaccaaagattattacaaattacaatagtattttaaattctatcgctggatcatttgaaacaaatatgtcatcaagtgaaattacttcattaattcaaatgcaattagatgatatggcttcatgggatatccatcaaattcaattaagtggacgtggaacatcaatgactggtggggcatatatgcctaacaataagctatattatatgattccaaatgatgaaagtgtatcttattgtagttctttaattaagaagatgatgaatggtgaaaaaattacaataaaagaataactttgatggaaagagcacttctaataagaatgctctttttgtatacaagttatatacaacatgatgttaaacttgatttagaaagaagggaagattatgcaagtattaaaaaacatagtgaataaagtgacacataagtttattataagtggtttgttattaggaatgagtttatatttaattatttcattacttttattaggagtattaccaatactatatgcgagtatagtcattattattattttatgtattaatgttagcttattctttatgatgaaaacagataatgaaaagtcagtaagagttattgtcagtaaagtcatatgtgttgttttaagcattatcatgttaattggcggaatatatcttaataaaggaaataagacactagagagtattacaagcgcagataaagatacatatacatattcacttattgtattaaaagatagtcatttgaattctattaaagatatgaaaaataaaaaaattgctatgaatgtgaaagaagatattcaatactttacaaaagcattaacttttttaaaagaaaatagtaaagattttcaaagcgaagaaattaatgattttcatcaattagcaaattatctttatcaaaagaaatgtgatggtatttttataaatgaagcttatcgtacaattatagaagaaaattatcctcattttacagaagaaacaaaagttatttggtcatgttcaattgataaaaaaattgaagacttttctaaaaatgttgatgttacaaataagccatttgttatttacatcagtggaattgatacgtttggaaatgtttcaactgtttcaagaagcgatgtgaacatgatagtaacaattaatcctgtgactaaacaaatattaatgacaagtattcctagagattattatgtgactttagcgaataaaggtaaaaaagataagcttactcattctggattagctggcatagagaatactgttaaaacagttgaaaactttatggatattgatatcaattattatgcgagagttaattttagttctcttattaagatggttgatgcattaggaggaattgaagtcgaatcaattgaagattttacaattggccaatatcattatgttaagggaataaatcaattgaatggagatcaggcattatattttgcaagagcgcgttatacggttacaggaggagataatggtcgtgtagctaatcaacagcgtgttttaacaggaatgttaaagaaaatgatgtcaccagttattcttacgaattatacaagtgttcttgattcgattgagggatgttttgaaacaaatatgtctgctgatgaaataacaagcttaattcaaatgcaattaagtgatatgagtagctggaatattgttcataagcaaatgtcaggtcatggtcaaaaattaacttgtggggcatatatgccgcaaagtaaactctattatatgattccaaatgagaaaagtgttcaagaaaataagttatacattcaaaaagttttaaaaggtgaaaaaaataactaacaaagaataagagaatattttgtgtttttgtgataaacaattcttatttcattgttttatagacaaagtcttgctataatggataaaaaaggagttgaaagtattgaaagatgtaacattagttgtaatggcagcggggataggaagccgctttggcggtggaattaagcaattagaaccagtgggaccaaatggtgaaatcattatggattattctatctatgatgcgttagaagcagggtttaataaaattgtttttgtcattagaaaagatttagaaaaagactttgatgaaattattggtcaaagaatcaaaaagaaagtacatgtagaatatgcattccaggaattagatgacattcctgaagtttatcaagaaagatttaaagatcgtagtaagccttggggaacaggacaagccatcttagcatgtaagaacttaattaatgaaccatttttagttattaatgctgatgattattatggtaaagaagcttatgtagaagcttataagtatttaacccaagaacatcaaagtgatgttttaccaatttgtatggtaggctttgtattaaagaatactttaagtgataacggtggagtaacaagaggaatttgccaagtcagtgaagacaacaagctagtagatattgttgaaacacataatattgaacgtattgatgggaaagctattgtagaaggtaaagaaattaatttagattcagctgtttcaatgaatatgtggggattatatcctgagttctttgatattcttgaaaaaggctttgatgaattcttaaatgctctagaagcctcaaatttgaaatctgagtatcttttaccaactattataggtaatttacttcaacaaggaaaagtctctgtagaagtcttaaaatcgcatgatgaatggtttggtgttacatacaaagaagataaagaatttgtaaaagaaaacatacagttattagtagaaaaaggagtctatccagaaaaactataatttgaaaatattgggaaattggaaagtttagctatttggatgaagatataaaaaacatattatttgataatattcatttaaagagggaaacctcttttttttgtaaaaaaaattaaatttactattcccaaatacaggaaaatatgttatattattaatgcaataagagattattgtgcggtattgttatgttctatttatataggagaaagtgagccactttctcctaacttttttgtaacaaaaagaaaaatactggataacccttatctattatccagtatttcttgtcaattgacaaatgaatcgattcagttttggtttcatattgatcttcacaagaagccaggttcttttaggctaagtcgtaaagataaatagctgactcaataacaacacgctgctgatgagaaaaatccctttcttaattttaaattttttttagttcattttcttagttcttttatataagagtgtatgtattgctattaagtttgtctctcaagacaatctcattatatgcatttcaagtgaaatagaaaagctaaaaaataaaaaaacgtgttttatcatgaatcattttcaaattcgtcaacttttaggtaaataaaaattgtaacaagcagaacctgttacaatttatttttttgttttcttcattaaccctttaacatcacccataagctcgcctttttcattaacgttttcacaaatataatccaatgatgcgttataaaaacgagaaaaacgaatcaatttacctaaagaaggtgttctttgattagattcatattgtgaaacaataggtttagacattttcaaagtttcagcaacctgtttctgagataagcctgcttcttttcttaaagttcttaatctttcaccgatactcataattctttcaccatccttttagatattatacactaataaaaattgcattagggaaacttcttgcgatttgcaaataaaatttattaaaaacacaatagggtggtaaaaagtgcccgtaattgtcttaaaagtgacatgacgaattatgggaatttatgtaaaataatgtatgcggaaaatataccgtaaaagttcattttacaaaaagaagggaaggggttaatatgaacatagcgatttgtgatgatcaagtcggttatcttaatctgattaaaaagaagattatagaatgttttcatgaagaagaaattgaattatatgtttatacatattcttcagttgatgaattcatcgatagtgttaaggagcactcttatcaatttgcttttattgaaatgagagtagaaaacaatcatggaatagaggcagcaaaaagattaaaaaaacgcaatccagcatgtcaagttgtctttgttagtgatcaatatcgacgagtacctgaagcatttcaagtacgagcaagagaatatctactgaagccaatcaagacagaagtattcaaagatgtctttgactatcttatgaattggtatttggatcaaaacattaaatttgtagtaccaattcgagatataggccgtaagcgcatattttcagttgatgaaatcaaatactttgaaacatactataacgatttagaaattgtcacagttaatgatgaacattttatgacacatgttaaaaacagataccgcttacgtacagcattaaaatcaagatggtttatgcaagtcaatcaaagtgtactagtcaatatgaaatgtatcgattttttaactgaccgaaatgtcattttaaaatcaagggaagtctttccaacaagcaggggaacacttgttaaaaatcatttgttgtacgataaatttttaaaatacctagaaaagaaaaaataagaaggagagagaaatttatgaatatagccatttgcgatgatgaagaattttatgtccaagacatatcaacacgtttagacaattttacacaaacttttaaagatattccattagacattgacacattcacaagtggaaaagatttaataaaatcatttactaaaaagaaatatgatttaatctatttagatatagaactagttgatagtaatggaattgatatagctcaatatgttcacgatattaaaccaaattgtatgattatctttgtaacaagtcatatgagttatgttaatcaatcatttatagtcaatgcatttcaatttataaagaaacctattgaatcaaaattatttatagaagaaatacaaagagcaatcaaaacctatcgctcttttactaagtcatatatgtttccaacatccaatggaaatcttattttcaaaacaactgaaattatatccttagaaacatcttataaatattacaaactatattcaactcgtggaaactattatggaaattccaaatcaattcaaacaataaaaaaagatttagaagaattttattttttcagaatacagagaagtcatttaattaatttatcacatatcaaagaaattcagtatccaaaagttattatgagtaatggtagtaaaattaaagtatctaaaaaacgatataaagacttcaaaaaagcatttaataaatttttagatcaataaaaagattgagcattgatatcactcaatctttttttgtctttaatataattcttaaaataactctatcttcttttgtatcatactgtatatcaccatcatatcgcttcacaatatccttaatctcctcaacaccaaaaccatgattcattttatcgaccaatttacttgttttataaaagcgtggctttgtatgaggaatgattgaattggtgatatgaataactaagtaatctttcttgtttctagcttcaaagtaaatataacgattttcttcgactttctcacatgcttcaatagcgttgtccaatgccaaaccaattaataaggctaattcattaatctcaatattaccatagtacatattcttggcgttttcttcataggtgatattcttttcctttgccaaagatagcttatcatcaatgacactatcaatcgaaacattaccagtatggatcagtgcatctctttcctctactacacccaacaattctttaaccagatcttcagctttctcatactttttgtccctaagataaccatatacaatatccagattatttctaacatcatgtctcatttttctttctttttcatctacacttattctcttgtaaatatattctttttctttcaagatgttttgtgtttgaattgccaaatccttttctattttctcgtgttttacttgatatctatcaaagaagatagatgatgcaatactgacgaacatcacaaatatgaaagttctaccaactactggaaaatagaaaagactacttgtattaaaaataataacagaacaaaagtaagcaaataaagtaatacttaatattttaaagtaatagaatttcctattgctcaaattgttgtaatacaaactaattatcataaatattacatatctttcaataagcaatactagcaaaatataagaaaataaaaagtttagataatagttaacaatttgagcatcaaaaatccaagtaaaaattaaatgacatgtaaaatgaataattacttttaaaataagaaaataaaagatactctttaaattatttagaaaagataaatgattaaatattaattggagaacaaaaagaattatagtgataaaaatagaaattataaaacttgttgaaagactatttgaaagagttaaaatagttaaacacattgtattacttaaatttaatttaaagtattttgtattttcatcagccttatgattgtagttgagtatatagaagttaataagatataaatctataattgataaaatacaattaattataaaattaataatcgaatccattcttaaagctccttattgataaattcacgatacttcactttgaaatcttttctctttttcttagtaatatgtaattcatgcttgtttgtcatgtcagttttttatctgtattaataattatataatagtttaattatatatcaactaacaaaaattttaattctttttctaataagttatctttgactggtctgacaataaattaagttatatatattaaataaaatttagaaatataattgacacattcaaattcttgtttttaatataattctcaagataaccttatcttttttcgtatcatactgtatatcaccgtcatatcgctttacaatatctttaatctcctcaacaccaaagccatgattcattttatcaaccaatttacttgttttgtaaaagcgtggctttgtatgaggaatgattgaattggtgatatgaataactaggtaatctttcttgtttctagcttcaaagtaaatataacgattttcttcaactttctcacatgcttcaatagcgttatctaatgccaaaccaatcaataaagctaattcattaatctcaatatcaccatagtacatattcttggcgttttcttcatagatgatattcctttcctttgccaaagatagcttatcatcaatgacactatcaattgaaacattaccagtatggatcagtgcatctctttcctctactacacccagtaactctttaaccagatcttcagccttctcatactttttgtccctaagataaccatatacaatatccagattatttctaacatcatgtctcatttttctttctttttcatctacacttattctcttgtaaatatattctttttctttcaagatgttttgtgtttgaattgccaaatccttttctattttctcgtgttttacttgatatctatcaaagaagatagatgatgcaatactgacgaacatcacaaatatgaaagttctaccaactactggaaaatagaaaagactacttgtattaaaaataataacagaacaaaagtaagcaaataaagtaatacttaatattttaaagtaatagaatttcctattgctcaaattgttgtaatacaaactaattatcataaatattacatatctttcaataagcaatactagcaaaatataagaaaataaaaagtttagataatagttaacaatttgagcatcaaaaatccaagtaaaaattaaatgacatgtaaaatgaataattacttttaaaataagaaaataaaagatactctttaaattatttagaaaagataaatgattaaatattaattggagaacaaaaagaattatagtaataaaaatagaaattataaaacttgttgaaagactatttgaaagagttaaaatagttaaacacattgtattacttaaatttaatttaaagtattttgtattttcatcagccttatgattgtagttgagtatatagaagttaataagatataaatctataattgataaaatacaattaattataaaattaataatcgaatccattcttaaagctccttattgataaattcacgatacttcactttgaaatcttttctctttttcttagtaatatgtaattcatgcttgtttgtcattgtaatatcttcataagtaaatgtatcaacatgcttaaagttaatgataatacttctattaagttgataaaaattataattcaataaatcctttttagtttgttttattgatttactattaccaaaatattgtgttctaggcgtaaatagtttataagtatcataacttgtttcaatataaacaatatcatctgttttaatatactttgttcctccacttgtattaaagactacacaacgatttaattgcgtatatcgatctacagaacgtcttaattctttttcaaataaactatctttgattggtttagtaataaattgagcagcaccaacccaataggattcaggaatataatcactatatccacttacaaaaacaataatacactcaggcataatatctttaatttgatatgccatttcgataccgttcttttctttaaattcaatatctagataaactaaatcatatcttacaaatttaaagctttccataaattcttcaggatcagtaaaaccatcaaatttatttggctgaatatcctccactccaaaatttcttattctttctaaaatgttgttgacgtagtattcttcatcgtcacaaaccgcaattttcataatatcaacctcccatattaatttttattcgtaattatagaaatcgcgagtaactctattgtataacaaattttaccatttgtgtgtgcatttttatcccaaatgcatgcacttttcaccttttcgacacaaaaatgcttaattttcaattatttttatattgggaagggggtgtaatgatatgaaaacaaagaagaaaatggttgctttaggaatgagtttaatgattttatgtggaagtcttgccagtgtatcagcgtacgtttatgtgtcaggtacaaaatatcaaacagtgacgcataaagatattccagcatggggtatgcaaagttttgatacttattatggaagcaagaaagctacaactggagattttgcaacatttcataaaacacatggtgatgcagcattaggtaattttgctgaaatcattacaaatgggaaatctccaagatctaattttgtaggtattcctgaaggtaaaacagttttatcagaagaacatttgtgttcaaagggaacaatttattttacttcagttgcttctcatagcttagaaccaagcaatacatgtgatgtcaacttaaaattcagcgcagataacctacgctaaaaaatagcaagccccctcattatcgaagggacttgctttcttttttagtaataataacttcttgaatacgtttgttttgaatcttggtgatttgaaaattccattcatcaacaacaagtgttttggtcgtaccatcttgaggaatagtacgcaaataactatataaaaatccacctaaagtatcataatcatcattaaatgaaatgttaatacccagttcttctactaaatcatctataagaatatgacctttcactttccattgacaatcatttatttgttgaataagagattgttcatgcatatcatgttcatcataaatattcccaaatatttcttcaacaagatcctctaatgtaatgattccgctcattttaccaaattcatcaattgcaattgcaaaatgaacatttttatcttgcatatcagcaaataaatcatctgcactaattgtttcaggaacaaaataaggtgaagttaaaagctctttaagagttttttcttttgtttgtaaatttaacagataatctcttacatgtaaaataccaataatgttatcttcatcattttcataaactggatatcttgataaaccagtttctttgatgatttgaatgatctcatcatcatttgcttctattgataaagtcataacatcaacactatgtgtcataatttcacgtatacaagtatcatcaaaatcaaatatattttgtaaccattcactttcatcttcatctaaaataccacgtttttcacctaattcaatcattgttaaaatatcttcctcagtaacggattcttcattcgcttcagttttaagatgaagtaattttaaaattgcattcgtagataatgaaagaaatgaaacaataggtttcacaatctttgctactccaagaacaacaccacaagaaagttttgaaacttcatatggtttttgcatcgcaattcttttaggaaccagctcaccaaaaaccaaggtaaaataagacaaaatcaaagtgataataataactgaaatcgtatctaaaacattgattgataaagcagttaatcctaaatcataataaatccaattggttaaatatttagaaaagttatctgctgcaaaggcactacctaaaaatccggctaaagtaatgcctatttgaatcgtagataaaaatcccgaaggttcttttgttaaacgtaaaagacgttgtgcagttttttcacctttgtctgcttgcttttctaattgtgttacattgagagataaaacagcaatctcactagctgcaaagaatgcattcactaaaattaaaataacttgcaataataattgcgagggtatagagtccatatcatcacactcctctttttttgtgtcctctaaccgtttttgtgatataaaaaaagactcatatcacaaaagtaataaaagtctcgttatttcatatataaaccggctataaaagcgtggtgacgattatataacatctaaatagatgctaactactcccttttatgtctctattttatcatattctttaaaactgtcaatatggatttgattatgctaaaatagaaatatgaaagtaggagatgtgagaagatggaattgatattagaagaatatgttcatgaaaatttacctaaaggatttcaaccctattctatttattgcatgattgtagataatgttgaagttggaagattggtcttaagagaaggacgtgatgaggatgtttattttgctggacatattggatatagtgtttataaagaatatcaagggcatcattatgcttatcaagcttgtctgcttttaagagaaatgcttgattttgatcatcttcttataacatgtaatcctgataattatgcgtctttaaaaacaattcaaagattaggctgtcagtatattgaaacaaaaacaatacctgcacatttaaaaaaagattttgcatctgaagatacagaaaaaatgatatttattttcaaaaaataatagaacaaggaggaaacacatgaagtttgtacatattgccgatttacatttagggaaagttattcatcaatattcattattagatattcaaagagaattgctttttgaattattagaatacatgaatcaagaggatattagaattctattgattgctggagatatttatgatcgttttattcctagtcaagaagcggtcaatttactagatgaatttttaagcaaagccttacttgattatcatattgaagttttaatgattagtggcaatcatgatagtagtgatcgtattcattttgcaagctctatcttatcaaaaagaggattgcatatagaaacttatttatcacaacatttaaattatgttgaaaaagaagctgtcagattttatttattgccatttgtgaaaccatcacaagttaaagctttatatcatgatgaacaaattcatgattatcaaagtgctttgaaagtctatatgtcacatcaaaaattagattctcattataagaatattttaattacacaccaatttgttgggcacaatagtttaacaagtgaatctgaaatgcccatcagtgttggggggagtgaaattgttgatgcatctttatttcaagactttgattatgtagctttaggtcatttacatgctccacaggcagttacaagagaaaccatgcgttatagtggttctttaatgcgttattcatttgatgaagtgaagcaaaataaatctattgttattgttgatactgatgatatgtcaataacattacatacactacatcctagtcaaacattagaaaaatacacagcaacatttgccgaattaatggatcctcattttatcaaacaaaaaaatgatttcttagcatttgagttaaaagatgaaacgttaattcctcatgcaatcgatcaattaagagtcttatatccaaacttattacaaataacgtattcttacttattaaaagaacagaccaatcaccaagttcaatccatacaaacccttgaacagacagatactcccacattatttcaacaattttataaagaaatgaaaaacatagaattatctccacaacaatttaaagttgtcaaagaattattagaaaaagtaggtgaagaacatgagaattcttagtttaaccatgaatgcttttatgacttataaagatttaacaacaattcatttcgatgaactgattgatcatggtctttatcttatcagtggtccaacaggggcaggaaaaacaacaatatttgatgctatgacatttgcattatatggtgttgcaagtggtacttatcgtaatcagtcttattttcgtagtgattttgctgaggcaaaagaagaaacttatgttgaaatgacttttgaacttcatcaaaaaatctatactgtcaaacgttcaccaacatatatgcgtccaggttataaaacaccaaagatggcaaatgcttatcttcaatatgatgatgttatgattgaaggtgtgaaggaagtcaataacaagatcaatgagctattaggcgttgatgttcatcaatttaaacaaattgtcatgattgctcaaggagaatttacaaaactcatttatgccaatagcgaggaaagagaacgtgtcttaagacatatttttcatagtgacccattagtgagttttgaaaatattttaaaagaagaaacacgtaaatataaagaaaagtatcagttatcaagtggacaattattatcacgttttcaattacttgatttttctaaagaatttcaagaaattcatcaagatggcttccatcctagttatattgatgatgcaatacaggaaaatgataaactctatgcattggtacaagaatatcaaaaacaatatcaaaagcataaagaccaatatgaacaattatcacaagcctattatcaaaaacaaaaacataatcaagatttacaagaatatcatcaagtgcaacaggcttatcaaacattatcaaatcaacaagcgaagatggaacaaatcaaaaaggatattgataaactaaatattattgaaaaaaatcaatcactcatttatcaatatcagcagactcaacttcaattacaaaataatcaaaaacaaagtgaaaatattacctcacaattacaacaatgtacaacactctttaaagatatccaaaaaaaatatacaaatctttctgtaattcaacaagaaaaagatgctttaatggttgaaatggaaaaaagtaaacaagcttttttaaaacaaaaagaatatcaaaagcttaagttaagttcgcaaaaacttcatcgtacttatcaacagacccaacaaaaatataatgaactcttatcaacacatcaaaaatttatcaaacgtatggaaagagatcaagaaaatgtcaatcatcttcccaatttacaattagaactccaacaaaaagaacaattggttaaagaagtcaatcaaaaacgggtttctattcatgaactaagtgaattttatgatgattttacaaaacttcaagatcaacattatgaattatcaaatgaatataagaaaaaagatgctatttatcaagatgcttttttacgttatcaaaaagaagatgaaaactttaaaagacaacaagcgggaattttggcatctactcttgaagataatcaaccttgtccggtttgtggatcattatcccatccacatctagcaaccttgacttttaaggttttgacttctaatgaattagaagaattaaatcaagaggtagaaaagaaaaaagctatcaaggaagatgcttatcaagaagtcttgagccaaaatgagcgtattcaccaaatgaaggcaaagattgatgttttaaaaaaacaattaaatattgaagaagaattatctaaagaagtctttattcgattgctttcagatattattcatattgtcgaagatcaagaaaagacatatcagaagtattatacagaagtagcatatttaaaaagaattcaaaaatcactagaacaagatcaaattgtatgtgataaacaaaaacaagagttagatcaattccaagaattattatattcccaagaaaaacaagcatctatttatcaaactcaaatacaagaattaatatcacagtatgaacagattgattctcaagattatcaaaaagttttaaaatttcaacaagatcaattggaattactcaatcaacatatccataatattgaagaacaatattatcagtgtcaaaaagatatttcagtttttactcaacaaaaagaaaccctagctcaacaaacgattcaattacaaactgactatcaacaattagaaaaacaatatctcaattttatttcttcatcatttaatgacgtacaagaatttcatgattatcaacagatattagaacaaaaatcagaaaaagaaaacatctatcaaaattatcttgttgaacaaaaaacattattaacacgtctcaaaactttagaaacacttacgcaaggtcaagaaatggtggatttaagtcaggaagaagtacgtttaaaagaattggaagaaaaacgagattgtcattttcagacttataatcagaaattacatacatatacaaaaaatcaagaaattcttaaagcattacaaaaagactatacaaaaaatcaagatatctttgaaaaatatactatgtatcaagatttatctgatataacatcagggaaaaatccacaacgtatgtcttttgagcgttatgttctatcagcttattttgaacatattttagaatatgcaaatattgaattattgaaaatgagtaatggacgttttgctttatatcgaaaacaagcggttaaaggggctaaacaacaagggttagatttaagtgtcttggattatgagactggtattatgcgtgatattcaatctttatctgggggcgaatcttttaaggcagcattatctttggctttaggattatcttcaatgattcaaagttatgctggtggtattgaattgaatactttatttattgatgaaggatttggcacattggatagtgaatctattgaccaggccttgtcagttttattagatttaaaaaatgataataaagtgattggaattatttctcatgtcgatgagttgaaagaaagaatttcaactcaaattgtggttgaaaaaggtgtacagggaagtattttgcatattgaaaaagaatagctagtgaagtcgtttaaaattcaatattcataattgcaatttatgataaatcttgtataataatatggtaaatatgaagaaaaggggtatatataatggcgaacaataaagtcaaaaatgatgcaattacatcaagagatgaagactttgctcaatggtatacagatgtttgtagaaaagcagagttaatggattattcaagtgtcaaaggatttattatttatcgaccttatgggtatgctttatgggaaatgattcaagcatacatggataagaaatttaaagaaacaggacatgaaaatgtttatatgccgctgttaatccctgaatcattacttcaaaaagaagcagatcatgttgaaggatttgcacctgaatgtgctgttgttacaagaggtggattagataatttggaagaaaatttaattattcgtccaacttctgaaacattattttgtgagcattatgcaaaaatcgtgaattcttatagagatttaccaaaattatacaatcaatggtgtagtgtagttcgttgggaaaaaacgacaagaccatttttaagaggttcagaattcttatggcaagaaggtcatacaattcatgcaacaaaagaagaagcaagagaagaaacaatgcgtatgttaggtatttatgaaaatacggctaaagatttattagcgattccaatggttaccggaagaaaaacagaaagagaaaagtttgctggagctgaggaaacatatacaattgaagctttaatgcatgatgggaaagccttgcaatcaggaacttcacattattttggtgatggttttgctaaagcatttggtattcaattcttagataaggataataaacaaaaatatgtttatcaaacatcatggggtgtctcaactcgtttattaggtgcaattattatggttcatggtgatgacaatggtttagtattgcctcctagagttgcaccaacacaagtgatgattattccaatccaacaacaaaaagaaggtattttagataaagctcatgaaattgaacaacaattaaaagcgagtggtatcagagttaaagttgatgcgagcgataaatcaccaggatggaaattctcagaagcagaaatgcgtggaattccacttcgtttagaagttggaccaagagatttacaaaatggtcaatgtgttgtcgcaaaaagagtcaatggtgaaaaaatcactttaccattagatgaaaagttacctgaaaccattgctcaattattagatgatattcatgaagaaatgtatcaaaaagcattagcttttagaaatgatcacattacaaatgcaacgacatttgatgaatttaaagaaatcttaaatacaaaaggtggatatgtgaagttaccatggtgtggtgatgaagcatgtgaagtaaagattaaagaagaaacggccgctacttctcgttgtattgatactgaagcaacagttgaaggagtttgtccaatttgtggtaaaaaagcaaaacatattgtttattttgcaagagcttattaatatacgtcatatgacgtatatttttttacaaaaaaactccttcaaaaaaggagtcacagcttgattttgacttttaataaatgaatcagtgaagcagcttggaaactatcaataattgcgccctgaatatcttctacagtcgttataagatttgtcaaatcacagctagataaatcaatctgataaagtgaagcatgctgaatttcacattgttgaagattacattcatgaaatgttgttttctttaaattggtttcaataatacttgcttgatataaatcacaatgttcaaaatgaacttctttatttttcataaaggcaaagtttgcaaatcggcataaacaatctttcaataaaacttgatcaaacaaagattcagaaaaatcagtgcctaaaagcttacaattaataaattgaacacgacgaaataaactcgataacaattttatattggaaaaatcacaatctttaaaaataacatcaataaaataactatcttcaaattgaacatcttgcatattaacattttcaaaaagacaatgtttaaattcaataccatggcaatgttgatcaaacaagacatccatttgataatgggcattattgatttcctcatggtctaggtctttggataatgttgttttttctaaatagtctaaatttggtttttgcatcaaatcaccccattgactatcataacataaatcaattttcttttaaccatatttatgatagaatatataaaaatgaggtgacaatatggaaagacaaaaaagaattgcattaattaacgacataaccggatttggaaggtgtgctattgctgttatggcaccgattatttcggcaatgaaaatacaggcagttacaattcctactgcgattctttctgcacatactcaatttccagttttttattttgatgattatacaagtaaaatgtctgattatattcaaacatacaaagatttaaacatagaatttgatgcgattgcaacaggatttttaggctctaaagaacaggttgatattgtgattgactttataaaaaggtttaaaaatgattcttcttttgttttggttgacccagtcatgggcgatcatggaaaattgtattcaacatatactcctgaaatgtgtgcaaaaatgaaggagctcgttcaatacgcagatttaatgacaccgaatttaactgaactcgtgactttggtcgatcagccttatccagataaattaccaagttttgatgagttaaatgcaatgtgcgcattgctttctcatcaaggacctcgtcatatcgtggtaacaggtattccatttaatgataagcaaatcttaaattttatttataatcaaggagaggattatcaaattgtgatggtcgatcgaatcggtcaagatcgatgtgggacaggagatgttatttcagcagttattgctggtcattatttaaatggacatagtttttatgaaagtgttcaaaaagcaacatcttttgcttctaagtgtattgcctattgtgaagaaaccaatgttccacgtcattatggtttagcatttgaacaatatttatatgagttaggagaagatagaaaatgattttatatacattgaaagataatcagtttgtagatttagcaagtttagattctttagaagatgctcatgtgtatgtgaatttaacaaaccgttgtccttgtgcatgtacgttttgtttacgtcagacaaaggtgatgagtgaatcacacacactttggttaaaagaagaaccgactgttgatgaaattatgaaagaatttcaaaaatatgatttagatgattttagtgaggttgttttttgtgggtttggtgaaccattagaaagagtggatgaagtgattcaaattgcaggtcttttaaagttatatcgtcgagatttaccaattcgtatcaataccaatggtttagctaatttaattcatcagcgggatgtaacccctcaatttaaaggtcggattgatattgtttccattagtttaaatgctcctgatgaaaaggaatattatgaattgacaagaagccgttttggaatcgaatcatttcaggcaatgctcgattttgctaaaaaatgtaaagcttacgttccccatgttattttaagtgttgttgatattataggggaagataaaataaaaagatgtcaaaaaatttgtgatgatttaaacgtgacattaagagtgcgtccatttgaagaataggaggaagattatgttatatatgacaagagaagaacgtcagatttctttagaaaaaatggtgaatacaagagatttaggcggttatgaaacacaaggtggaaagtacagcaaagcgcataagtatatccgtgcttctgctccaacatatgcaaccaaaaaagatattgcggatttaaaagcctatggcgtaaaggtcgttattgatttaagaagtgattttgaaaaagaatgtcaaaaaaatccttttaaagatgatccggatattgatttttatgaagtgaatctttttgattcatccacagcaacaatcgttcctgatgaagtcaagatgtataaagatttgggtggcgtttatatttatatgttagaaggtatgaaggataaatttaaagagttatttgatatttttgttaagtatccttatgaaggaattatgttccattgttcggctggtaaagatcgtacaggtgtaacatcagctttattattagatttaattggttgtcatgaatatgatattgttaaggattatagtgaatcttatgagaataatattgagattaatgaaaatttatctgagatgatgaaagatgaagaagcaaaacagtatttaaaatcttcaccacgttatatgatggaacttttggattatttaagagagcattatggcagtgcaaaagagtatttagttgaaattgggcttaaaattgatgaaatagatcaattaattgaaaattttacaatttaaaaaagaaaaatcgcctcttacacgcgtatatataagtaggaggtatttttttatgaaagaaaaatttacattgaaagaaaaggattttattgtacgaggcatttacaaacgatatcaaagagcacaattggatattctttatttgaatcagcattataattactatccacaggttgatgtgttcaaagtgaaagaatctaatgctcattatcaaaaggcagatgctcaatttgttgatcagcttcaaagaaaacaacagttagaagattttgtaggaattgtcaatcaaatacatacccatctatctcaagaaacatatcgttttattgaaaacgaatatttaaatttttatgattcatcatggtgggtgccttatttttctcgagcgacttattatcgtttgaaacatcgtgctttagatgaaataatagagtgtgcatatactttttttagtgaaaatgatttaatcaagttaatgttatgagatattgccaagcgtagcaaaattatgtataataccaattaagtcaataaaaggagaatgttattcatgataaagaatttaattggtggaattgctgtgggaattgccaatgttattcctggtgttagtgggggtacaatgatggttatcctaggaatctttaatcgtatgatggaagctatttctggggttttccaaaaagacaatgatcaccgtaaagaagatatattatttttgttacaagttttgattggagcagccgttggattaatcggtttcgctaagattttagaatttttatttaatcattatccaacacaaacaatgtattggtttattgggttaattgcttttagtattccattatttttaaaaggtgaaatgaagggtgaaaaaattaaaatccttccattaatttgtggtttagccattatttttggtttagagtttttaaatccaggtgaaggaagtgtggaagtaaatccatcatttccaactgttacattaatattatgtttgaaaatgattcttgttggaatcattggaggagcaacaatgttaatgcctggtgttagtggatcaatggttttattgattattggtgaatactatttatttaaatcttatttagcaaatgtaacatcttttcaacttgacgtattgattccattatgttttattggaattggcgttattcttggaattattttaagtgcaaaagtctgtgatttctttattaaaagatataaagctggatttttaagttttattcttggattgattattgcttcatcacttgttttgattccttttgatgcaagctatgatgtgatggttgtagtgagttcattacttgcgcttatttttggtggtgtcattgttttaggattaggaaaattacaataagcagcgagggctgcttttttgttaatgtttgatttgttttgggctataataaggatagggtataggaggtattttatgaacgtagaaattattaatgtaggaacagaattattattaggggaaattgtgaataccaatgcaacacttttacaaaaagtttgtcgtgatttaggttttgatgtatattatcaaagtgttgttggtgataaccctaaacgtctttacgactgtttgaagttagcctttgaacgtggggcagattgtgtcatgacaactggtggacttggaccaacgactgatgatttaaccaaagaattatcggcacaatatcttggcttagagatgttttatcatgaggaagaagctaaaaaagttgatttaaaatgtcgttattgtactggggtaaaagacatcccacaaaataattttaaacaagcatattatccaaaagatgcttatattttagaaaatgatatgggaacagcaaatggatgtgtcatgagtaaagatgaaaagatgattattaatttaccagggccacctaaagaattgaaatatgttgtggagcattctttagttccttatcttttaaaatacaaacaagatacaatttatacatatgaatatttaacgatgtttattggtgaaagtaaacttgctgaggttttaagtgatttaattaatgcgcaaaaacaagtatcaattgctttatatgctggtgaagaaaccgtaagagtgagactggcagtaaaagcatcttctcaaaaagaagcagatgcattaatgatatcaacaaagaaacagattgaggaaagaatacattcctatattatttttgaaaaagatttaaaagaggctttgttaaaaaatatggttcctatttctatagtttataaaaatgattttcgtttacaagatgactttttaaaaccatatttatcaaatcatcctgaaattgagattgttattgagacaaaacaagttgatttaggagagattgttatagttcatttcaatgattatacatttgaagttccaacatttgtaaaagctgaatattcttatgcaaaggttgaagcacgctttattgctcagctttatcgatatataaagaatttcaagaaagaaaaatgtcaaaatttaatgtgaaatgcataaaaaaattgtaattttcaattttctgtatataatatcactgtaaaatttaatatagagcggaggatatggatgaaatataagattgaaaattgtcgctatgaattggtgaaggatttattgtctagtcttgattcattaatcgctaatgtagagaaagatgaacaagggactattgtgactctacatgagggaaattctcagtttgatttaatgagagctttaaaacaagatcctttacaaatgttttgtgaaaattgtaaagtttatgctgtatagacgtcatcattggatggcgtcattttttatcgtttatgttgtaaaaatatggtatttttaaaaactaatcctatcttttcaaaatgtaagagtttacaaccttaaaaataacaaaaaacattgataaaaacaggtaaattttaacttttttcttgcgaaaatagaaactttcaatataataggaagtgtcctaagggataacacatgtatgtcaatataatattcctcgacatacaaatcagcaaataaaagtattcatatgagttttactcaaaaagagtgatcactgttagaggcagcagtctaacagaggtagtgaacagcagcactattgatcattcatataagaaaagagcgataaataggggtatcgctcttttcttatatgtgaaacaattcaatgaattttaaagcagcaggggttaatgtttttcgagtaagatgagcataaccaatgcttcttttaggaataggtggattgatcttaatttcataaatatcttgattatttaattcttctaatgagaactctttgattacacaagctttaccaagattgtttttcgctgcctccaataacaagtcatgggaaccaagttcaattgaagatgttaatagaagtccctgactagcaaaatgataatcaacatattgtcttgaatttgatgacctttctaatagaataagtgattcatgtgaaagttcctgtaaagaatacactttttcttcaggatttttggaaacaaaaatatcatggacttgtagacattcttgaatggttatcgcttcatcgtgtaatggcatatttacaaaaccaatttcaatttggccatttttcaataaatcaatgatttctaaactggtacggttaaccattttaattgtaacttgggggtagagttgattgaacttaacaagatagggcataatataattctcacttagggtatctccagcaccgattgttaattcccctttggttaaatcgtgtaaatgaccgatttgattttccgcacttgtgattaaagaaagagcttgagatattttggtataaagcatttctccttctttggttaaaacaacacctttagattgtcgaataaaaagttgtgtgtttaattctttttctaaagtatggatggcttgtgaaacagctgattgagaaataaaaagatttcttgctgctagagaaaaggataaagttgaagccgcttcattaaaaattttatattgttcgagtttaatgttcatattagttctccttatatcatattttataattattaattttactaatagataaaaatatcatataatacaggtgttgaaaggtcaacaaaagaaatcaaatatcgtaagatagtgatgatagaaaggaagatagaaatggcaggagttgttgtagttggaagtatgtggggtgacgaagggaaaggaaaagtcactgattatttagcacaaaaagctgatgttgtggtgcgttatgcgggtggaaataacgctggacatacaattgtttatgatgggaaaaagtttgctttgaaattgattccttcaggaatttttagtggacatgaagtgattatgggtaatggtatggttgtaaatcctaaagcatttttagaagaagtaaaatatttaaatgatgcaggaattgatacaagcaagattcgtatcagtgatcgttgtcatgtgattttgccttatcatattgcgattgataacatccaagaagaacgtaaaggtgctcatagtattggaacaacaaagcgtgggattggtccaacttatgttgataagtatagtcgtattggtattcgtatgggtgaatttattgatgaagatttgtttttagaaagattaaaagaagttttcccaatgaaagttatggaatatcctgaattagctgaacaatttagtgttgaaagcctctttgaagaatataaagaatatgctaaaataataaagccattggtatgtgatacaggaattttacttgatcaatatttacaagaaaatcgtaaggttttatttgaaggtgctcaaggcgcaatgcttgatattgattatggaacttatccttatgtcacaagttcgcatccaggagcaaatggtgtgtgtgaaggcgcaggaattggacctttatatattaaagaagctattggaattatcaagtcatatacaacacgtgtaggagccggaccatttccaacagagttaaatgatgaaattggtgatttcattcgtgaacgtggccatgaatatggaactgtcacaaaacgtccaagaagaacagggtggtttgacgctgtggtggttaatcaatcacgtagaatgtcaagtttaacaggaattgctttaatgttgttggatgttttgagtggacttgatacgattaaaatctgtactgcttataagtataaaggtgagattattcatggtttaccatcaactgttaaaggaattgaagatgttgaacctgtttatgaagaaatgcctggttggcaagaagatattacagatgtgaaatcttttgaagaattgccagtcaattgtcaaaattatattcgtcgtattgaagaattaattcattgtcctgttgtgatgttttcagtaggacctgatcgtagtcagacggttgttttaaaagatattgaattttaaggagggaaatgagtgaaaagagaattagtcattgttttagactttggtgggcaatacaatcagttgattgctcgtcgtgtgcgtgaatgcaatgtttattgtgagatttattcttataagattgatattgaaaaaatcaaagctatgaatcctaagggaattattttaactggtggacctagtagttgttatgaagaaaatagtgcaacttattcaaaagaattgtttgaattaggaattcctgttttaggattatgttatggggcacaattgatgcaacatttattaggcgggaaagtcgaacgtgcaagtgtaagagaatatggaaaatctgaattgacagttgataatgattccattttatttcaaaatgtcgcaacaaagagtatttgttggatgagtcattttgattatatctctcaaacagcaccaggatttaagattactgcaacaacacctgattgtcctgtggcagcttgtgaaaatgtagaaaagaacttatatgcgattcaattccatcctgaagtcttacatactgaagaaggaacaaagatgttatcaaactttgtattgaatgtttgtaagtgttctagagattggcgtatggattcgtttgttgaagaacaaattcaagcgattagagaaaaagttgggacagggaaagtcttatgtgctttatctgggggagttgattcttctgtagcagctgttcttctttctaaagcgattgggaatcaattgacttgtgtctttgttgatcatggtttacttcgtaaaaacgaaggtgatgaagttgaagctgtttttggacctgagggtaactatgatttgaatttcattcgtgtgaatgcgcaacaaagatattatgaaaagttaaaaggtgttgaagaaccagaagcgaaaagaaagattattggtgaagaatttattcgtgtctttgaagaagaagcaaagaagattggtacagttgatttcttagttcaaggaacaatttatcctgatgttgttgaaagtggcttaggtggcgaatctgcagtgattaagtcacatcataatgtgggtggattacctgattgtgttgattttaaagaaattattgaaccattaagagatttattcaaggatgaagttcgtaaggttgggttggaattaggaattcctgaatatttagtctttagacaacctttcccaggaccaggacttggtattcgtattattggtgaagtgactgaagaaaaagtaaagattgttcaagatgctgatttcatctatagagaagaaattgctaaggctggacttgatcgttcaattggacaatattttgcagcacttacgaatatgcgttctgttggtgttatgggtgatgaaagaacttatgattatgcagttgttttacgtgcagtgaatacaattgattttatgacagctgagtctgcagagattccttatgaagttttaaataaagtgatgtctcgtattattaatgaggttcgtggtgtgaatagggtattctatgatattacgtctaaaccaccagggacaatagaatttgaatagaaggtcaaatcacagatagctcgtattttacgggcttttttcatttataaaaaaggagatgatactattttgatactacagacatgctgagtttactattcttttttaatatttttatctattttatgagtagttttaagagattaagatatgaaaaagcagaattattatatcctaattaaaaattacattcttcaaaacaattaaatttaacaaggtttatgagaatgagattgaattttcttaaagaacatcataaaataatttatactaatatgataattaacaatatgttaaatgaacatttataaagtatagatgatgaggctaatcaggtatatgacaaactcgttgatgattataaaaagaaaagaaatattactgaataacttaaagaaaaagatcaattaaaatggattcaagagatgaataacattgaaaattatgtaatggaaatcatattgaaaagtattatatattctttgtgacttttaatgtatagtttattaaattgttttatcaagctgaaattgattgttaataggaatggtatattatataatctatatgtattacaaaattttgcgaggagtttaaaatgagggatatttttcaactaataaaatataaaatagcaccactgtttagtgatttgaagagattgtttttctttgcagttatttattcgattattatctttggaatttctttttataaaagtaatgatgaattagttattttaaggattgtagaagcttcagttcctatttctattttctttgtgatttggggtgttgaggcagttatcatgatgggacagtttgttgatagacctgagcctattttcaaaagtaaacatctaatgaaaccaggaagatatattatgagacaaataggaccgtttattattgctagagaacttaaaatctcgccagtagatgatttttgtatatctttgctaatcattgattttatttttttaccattagtgattatctcaacgatagttagtggaacttttagtacaattttctttaatataatttttgcttctaatcttacaattttaaaagaaataaatagattagaaaaagattatgttgaaaatatgaaaaaagcaaaagtaatcttttttaaaaacaagggagatatgaatgtactgaaagaacatgaagagtatcagcgttaccaagtttctttagaatatgaagaaaaatggtgtaaagaactaaatgatattaaagaaagcatatgttgaaggatattgcaaaatagttgttttggaattattttacttttatgttgattttgaaaaatttaaaaatgctaatattgaacgaattttaattcattctttaaactttgataaaaaagaattgcaaagttaaaaattttttgaatacccacaatccacaggtgagaaaagttatgagttagctgtacaagaaaaatatgatactgaaatatttaaaatgtatactatctgtctatgactgataggaaatgatctttgtatatattcctttattttattcagcatgttgtttcccgtatatctatgattaaatctatattcttgttcattcacgaataagggcatatctcttttggctacaccatgatatattcctgtaatattattcttaatattcccaatgatgatattcaaccaaaaaagcctatgattcttttcttcatagtttactttctcattttttacctgtatctgggtattcaatatattaaagcccttttccccatctgtattaagtattgcatcatgatataatacacaatttttttcaatatttctctttaatgatagacttgtgtagtctttgagtaatcttaacttaatgtaccggggatagttattctctttgtctgttgataaaactcctaagatttcctgttgcttactcgcgcgacctgctttattcttagatttagcaccaacattaaaaacatcagcttcatagaaatgactttcaagaagtttatctgaattacttaatgacataagaattctacattttgtttctaaaagaagtgcgctcttataattgacatcaagcattgaacataaatccactgcagtcaatcccttattttcattgaagaaaaggaaaatacctaacaataacttatataaatcaaggttgcagctttgaaagatggtgtttgaaagtagcgaatgttgtttgtgacatttcttgcattcaagtaaatatgaagttttagtcttacctacacgtttgattaaataatattcatgacaatcacaatgatcacatgaaaaaccatcgggctatttcatagatatgaagaattaaatgcaattatcaatattattggcataggtttgagtaaattgataaagagaacattttttgggttttaatactttgtttgacatataagaatacctccatttgatttctaacttaattataaatcaaatagaaaatccacgtacttgaacaaacgttattaacaccgcttttccggtgttaataatagttttaattatttacctgtgaattgtgggtattcaaaaatatttttagatgtaaaaaatatttatgataaagatgagattgtttaggaaaatagaaaatgttataataaaaaaaaggagtcgataaaatgaacaaaaaaaggattctgccatctcatcttttttaggttttaaacttcaagagcagcttgcacttttacttactttgcaattaagggcgaattgtaaaggagcaagtgttacaatagaggaaatagacgatgttgcaataataagagataatttttatgaattatatcaggttaaaaattttattactagtagtaataaaataactgattattctattgatatttggaagacgctttataattgggcaaaaaaatttatagataattcaataaatcctacttctgaaattgttctatttataaacagtcaaaaaaattataaatcaggtgattttctttttgaaatgaatgaaattaaaactgatgttgaggcaactgatttttataataaaatttatgataaatataaaaattcaactaataaaacaataaagaaatatatagattttctttttttagatgataatagaaatacattcattgatattttaaaaaaatttacattggtagataggaatgtggatcaattagaaatattaaatgagtacatttctaaatactgtacttttgggtcacaaggaacatcaatgtttgaaaaagctagacattttataattgctgaatttcagatgattatcacaaggcaatctcaaaataaggatggaattactattgatgttgaaaaatttcatgatagaatcgataagttttgtgatatatgtaataatcttagtgttttgagatctactacttgcgatgaggatattgatataacagctgcaataaatctttcttttattagacaacttgaatatatccaaataggggaagaacgtcttgaaaaagcaaaatatgattattataaaacaaagatagatgtatttaattatttacaagattctttaattttagatattgattttcaaaattttaaaaaaagattaattagaatatgggatggaatcaagatggatcataatgaaggatattctccaagtgatgcgaagaaaatttttgcagattgcacaaaggtaaaagacaaattagcaaatatcccaattgaacaagattatttttgtattggtagttatcatattttagtacaagatgattgtgaaatggaatggtatagaattaaaggagtaaataataatgaatgaatataatattagtaaaaatagaatgatgatactttctttaattgtgattcttttgagaaaacaggaacataaaaaaatggaaatagtacgattgattgtgcttacatccttacttcttgatagaaaaattaaggaggggtataaaactagaactaattttgagtatttttttaggaaagaagaaaagaacttttctaagtatagaatttattataatatccaaaataatttaaaaaattatcaagaaaaaatatataacgctatagatttaggaaatagatcagggataataaaagttaaatatgatagctataatgaaaatttattagtagaattgataaatgatgaattgaagaatatacctaaatcacagttaccagaaacatataaaattataaaagatgttgataaaataattaaaataacgacaaatatggaaactaattatttgattaaaataatgagattggagatatagatatgtataagataaaagaaataatattatggccatttgattctggaaaatcatataggaaaataaaattttcatctaataaagtaaatgtaataactggagattctagaactggaaaaacagcattaattgcttgtatagattatgttcttggatcaagtaaatgtatgattccagttggtgtgattagagaaaagtgtaaatggtatggtgttattatgaaaaacgatgtatctgaaatacttattgctagaagaaatccagatacttcattaacaccagagttttatttttttgaagataaagtggttgatattcctaatactatagaaaaaggaaattatagtagtgataatttaaaagattacttaaataatttacttggatattctcaattaaaattatcagctaatgaagatagtgaatacaatacaagaccttcatatagagatactatggcatttaattttcaaccccaaactattattgcaacaccggatacattattttataaagtaaatttaacaagtcatagagaaagattaaaaagagaaatagattattttttaaatattatagataatgaagaattatttaatagagaaaaaagtaaaaatttaaaaaaagaattaaaagatgttgaaaatatgattttaaaagaaaaagaattatcaaatatttttttacaaaaagtaccaaagcttatgacggaggcaatttcatatggtttctttcctaagtctaaagtattgtctgaggattcattcacaaatttaggtgaattaagaaaactgttaaaaagtgaagtatgggatagttatggtattagtgaaaaagctttaaaacaaatgcataatacattttctgaatttgaacgaaaacttgctaataaatatcaagagatattaaagcatacaagtttaattaatagtattgataaatcaataaatgttattaatgattacaaattatctgaaatggaggaaagtttgcgactaactgagtggcttgctgaaaagattcttaatgatgattttttgctttcaaatttaattaataatgatgtttcaatagaggatataacaaattcagtaaaaaagtataaaatagataaatttattagcgaaagagaattagagaatttattggaagaaaaacgtattaaagaatatagcttgcaaaaattggttgatgaatatgacttattaaatgaacaactaaatgaaatgaaaaagtcagaagaaattgctaaaaaggataatgatataataaaaaataaatatatgtttttaggtagattaaaatctgaaattgaaaaaattgatcaaagtactaatttagatgagcttaatgataaaaaaagaaacattacattacaaattagtcagttgcaagttaaaaatgataaaatattaaaagaaaaatttaacagaataaatcaagaaatttctgattatagtttagacatattatcaaccttagattgtgaccataaaggtgtaccaattaattttgaaagaaatgaattaacaatatctattgtcactggtgaaaggaaagatgataaagattatttgtatgaaataggaagcgcttcaaattggttatcttatcatatagcatttatgcttgcattacataaatattttctgagcattgataattcaaaagtttttccatttattgtttttgatcaaccaagtcaggtatattttcctgatgggtttaatcaaaaaaatgggataagaaatagatctaatgatattgaaaaggtaaagatgatatttaaaaccattgataggtttgcaaaaaataatgacttacaaataattattttagaacatgctggcgaagatttatgggacaatttggaaatgttccacacagttgaagaatggggagaaacaaataaatttgtacccatagattggtaaaataataattttttaaataaattatatttatatatatcatttagtggtgtaaaaaatatcttattttgaaaattatttattcctaaaaaaacagttatttttttaaattaagcgttcatatcttaaaaatatgaacgctaatatacttctaaaaaattatgagttattgtattatacgtaatagatatttgtaatataaagaagggagtttcataaaaaatggttcgcaaggacatttttacacctattgtcataaatcattttttctattaagtggaacagtatttgataattatatgatttcagtaactgaatggggtgaatcttatcttaatatttttaaataagaaagtatcaatttggtaataaaaaataaaaataattttaatgtttcaaataaaagtgatatataagtctttttagtattggctgagatttttaataaatttattttttgaatattcataatctacaggtacaattaagaatttattttaacagtgaaaaaatggtgttaaacaaatctgatttaatgatgcggattttctatttgatttataattaagttagaaatcagatggaggcattctgatatgttatgcaaagtattaaaaccttaaaaatgttttctttatcaatttactcaaaattacgccaatagtattgacaattgtattgaattctttaaaaatatgaaaaaggtctaatggcttttcatgtgttaattgcaattgccatgattattatctgttaaaatttattggtaagactaaaattttccaagtcctttatttaatggatgttataaacaacatgtttttgctttttggtactgtttttcaaagctgtgatcttaatctctataaattactattaggtattttccttgtttttaatgaaaacaaagggtttacttgttgtcaactataaaattgatcttttttaggaaacaaaatatagattccttatatagttaagtaatttagataagcttcttgaaaatcatttctataaagctgacgtttttaatgttggtacaagatcaaaaaataaagttggtcatgccagtgaatagcaggaaattttaggtgttttatgaattgataaagaaaataactatttcaggaatattcagttaagacttatcaaagattatacaggtatatcattaaagaaaaatgtagaagaaaactgagagaatattccttctgtatatttaagtaggtattcatcttattcataatagaaaaaggttcataaaattcttttgaaacaatttaaattaatacatgaattaaatgatataaaaacaaaagaaatttaaaggcaaagtaatctgcatatccaattaataataaattatgtaagcaattgaaaattggttttatacatagattatttaatagaaataatttgctaaataatgtagaattaataataaggagtgatattttgtgagaagtgaaaagaatattgaaagtttgtctgactatattcaaaaaatagaaaaaattaggaatagttttggtgataatgatgttattgtatatagaggagaaaatcaagagtttaaaaacccatgtatgcctaatttgtttagaaaagattatacaactaagaatcatttttttgaaaaaaatttattagatgatatggttgccaataaattaacagagggcgaaagttacttgattaaagcagttgatgcacaacatgggggatttcctagccgtttgctagatgttacatatagttctttagttgctttatattttgctataacgccattttatacatggccggaagatcaagatgatgataagaatggtgtggtgtatatatttgattttgaaaaaatatactgtccaattgcaaaaaatgttaaagagctttataataatattttagatagaaaagagaagtggctttttaaagatactttatttcagtataaccataaatttgttgatcatattctagcaaataacagaataatagctcaacaaggagcagtaatattattccagggagatgaatttgttcctataccagaatattgttatgaaaaagttattataccttataatttaaaaagtgtatttagaaaagaattaaaagatttatttggtatttacactggttttatttatccagaaggagaccataaagttgatgagataattgataagagtataaaatttgattcttcgtttttttctaagaaaactgaattaaagttaatttctgatcatattaaaaagtattttggatataatataaaaaggatagtcactcaaaaggaacaaattagttcattcgaacttgagagacaaataatgacaattgaacgagaaattagagagttgaaaaaaagaatattagatttaagtgagattactgatgatgaaaaagaagtttatgataaattaaaagaagaatttaacaaacaaattgatagtttagaaaaaaatattaaaattgtaaataataaaatgataatttcttcagacgaattaaaattataaaatggggtgaaagtatatggcaagaaaagaatataataataatggtaatgagttaataaatcaatttttagaagaaaaagatttttttaaagaaaataataatgaagatattcaaaaaattaaacaaaatatttcaataatattttacaagcagaactttattacttttgaagaattggggatcgaaaattgtgataattttgtggattttttttatataaaaaatgaagatgagttggaaatgataaaaaagattattgagtcacaaaataatatagaagataaagaaaaatatggtttttattatataataatgattgtagaaaattataaaatgaaattaatagcagaaaaatggaaacaggagataagaaatttagtaaaaaagacttttaattgtaaaagtatagcaagggtaatttatcaaataattcaagatgtccaaaatgatagtaaagaatttgatatacaaattgatagtaggttgtcttctattagtatgcctttagaagatgataaaaataaattttataattcagaaagtatttcttctaaagtaagttcatacgtttttacagcgaatttatatgatatagcaaatatgtataattatattggtgatgcattgtttgataaaaatgttcgatataagttaaaagatgtttttgatgtagaaaaaagtatattagatactttagattccaatccggaagatttttggtatttaaataatggtataactatgatggtatcaagtcgagataaaataaatttatttaatccaaataagctcatattattatttgaggagtttggtgatatttcagttgttaatggcgcgcaaactatttcaactgctgcaaattatttttttaataattcaatttcaaaggaaaaattaactaatgcaaaagaacatgctaaagtaatattaagagttatgtatgtaaatgatattagtattgattgtaaaaatgatttaaataagataagtgtttctttaaatagacaaaaaccaatttcggtagaagatattgcttatacaagtgaaagaatttttgaaataaatcaactatataatgaatataaagatgaatttcatttctacatttcaaaaagaggtgaagaaacaatcaagaaatatgtttataatataccaacttttatgagagcttatgtagcctattattgtcaaaagcctggagatgcaagatcaaaatcttctaaaaatattatcgataacgttttaaataatatattaataaatgaaatagatgataaggaatttaaaaagctctttaagccattaaattttgttattacattaggaaatttgtatgataagtattcaaataaatataagagcaagattgaatataaaaatataattgtaaaaaatggcaaatattattttatttctttagtaatgatttctttagctaaaaaagataacttgcttaaggaaaatggtcactataattatagtgaattcatctattcacctgattattgtaataataacaaaaaattagatgaattagttgatacatatgttgatgtagtatatagctgtagttgcttatcaaatgaaattgaagttatagcttcaaatgattttaaaaatcaaaagttgtatgatataattcttaatcatgaagaatatgataaattgtgtaaaaaagtaaaagaatttttttagataacgactattatcaccatcagggtgtcaataatatttattaattacactataaattaaaattgttagtatttgggaggttttttgatgaaaacaattaatgtggttgcagcaatattaaaaaaagataataaaatattaatcgcaaagcgtggttatggtgaatttaaaggaatgtatgaatttcctggtgggaaaattgaaagaggagaagatcctgaagaagcattaaagagagaactatgggaagaaatgaaagggggtccatattgaggtggactctttcttttatcatgtacattatcaatatccagcttttctattagagatggattgttatatatgtcatttattagatgaacatattacgttgttagaacatatggattatcagtggattacacctaaagcaagccaaatattatgggtccctgcagatgttgaagtttttgaagaaattataaaaaggggtatatagttatggatgaattgaaaaatgctctctattctagtttcattgataaaaacattgtttctgcaaaagaacaaagagcaagacttgtttataatgattacaaagaaaatatgaaaatgtctaacgagttacaacatttattaaaagaatgtgatacatttgatatatctgttgcctttattgctgaatcaggtttagctgcaataagagagacacttaatacattaagaaatcaaaataaaaaaggtcgtatcatcacatctacatatcttggatttaatgaaccaaagatgtttaaagatttattaaaatatcctaatttagaagttagggtatttgatgatcaaaaagtatttcatccaaaaggttatatttttagaaaagataattattatcaagctattattggcagttctaatttgccacaatctgctttatctgaaaatcaagaatggaatctattttttacttcaacagatcaaggcgaggttattacccaaatacaaaaagaatttcaaaaacaatgggatatgtctgtccctttaacaaaaaagtggatagaagattatcaaaaaagttacgtaaaaccagtatatcctaaacataatcattattcacaagaaataaaaccaaatatcatgcaacaaaatgctctttcttcactttctacattgagaaaagaaaataaagataaagcattgcttatttctgcaacaggtacagggaaaacatatttggcagcctttgatgtaaaagcagttcatccaaagaaaatgttatttgttgttcatagaaaaagtattgctttaaaggctatggaaacatttcaaacaatcattaaagataagacgatgggagtattttctggaaataccaaagaattagaaaaggattatcttttttcaactattcaaacaatacataaagtagaaaataggaacttatttaaacaatctgagtttgattatattattatagatgaggttcataaagcaggtgcaaattcttatcaggaacttgtgcaatattttaaacctaattttttattaggaatgtctgcaacttctgaaagaactgacaattttgatatttataagatgtttgattataatattgcttatgaaattaggcttcaacaagctatggagtatgatttactttgtccatttcattattatggtattactgattttacgattgatggacaagaaattgatgataaatcagattttaatttattaattagtgatcaacgtatagattatattattgataaaattaatgaatatggctattctggaaataaagttcatggattggtatttgtcagtagaaaacaggaagctattgaattatcacgattatttaatcaaaggagctattcaactcttgcattaactggtgaagatagcgaaacagtaaggcaagatgctatggatcgtttagaatcagaaggtgataatagtttggattatatatttactgtagatatttttaatgaaggaattgatattccaaaagttaatcaagttttaatgttaagaccaactcaatctgctattgtttttgttcaacaattagggagagggttaagaaaaaacaaagataaagaatatgtagttgttatagattatattggtaattatgaaaaaaattttttgattccaattgctttaagtggaaatacaaatttaagaaacgttaatttattcaaaaaattacactgttttagaaagctatatgctactcaaagcctttattcataggactttagaagcaatagcttttttttcgtattgttgaaatttcaacggtaagaagcaagtaagatgctagtaagaagcaaaattaactacacaattaatttttaagctacacaagtaaataaaaaatttatttaatgacaataaaataattaaagaatataatcaatatatatatgaattaaaggagaaaaatatggaaaagttaatgagtgaaaaaacagcaaaagagaatttggaaaaaaattatgaaaaggctactgaattgttaaaagatgaagaccaattagaaagatttttacaacgtttagaaaaaaagttaaaagtaataccttatgcaggggataaattagctgatattcctataatggtttcattagttagaaactatgttcgaaaggaatatgctgatgttccaattggtacaataattgcaattatcagtgcattaatttattttgtatcaccaattgattttgtgcctgatagtattcctgttttaggatattttgatgatgccgcagtagttgcagcatgttggaaattagttgatacagatgttgaagaatatattaaatggagagagaaaaataataaagtaattgatatttgattttatggagaatttgtatgaatgaattttataataagttaaaatattttgaggagacagagaaaattccatcagaaatttattatcattatacatctttagattctttattttacatagtagatagtaaaacttttagacttacaagtttaaagtcatcaaatgatgctaaagaacttttttataaaactgatgaatttataaatgatatttcaaaaatacttgaagagacaaatgaacaaaaatgcaaagaatttttagaaattattattaaaagtattgaaatacataatgatgttttcttgaagttatgtaaagaaaaaagaaattcttatgcactatgtttatcagaaaagcgagataatttaacacattgggatagatatgcggttggatgtacgggtgtttgtatagcatttaatgtctcagctttaaaagtattgatacaaagaatggcttgtgaaattatcggagatggtttattcgatgttggaaagataatttattcaaaaaatggtagagaagattttataacgagattaattctacgcgtattagtattatttgaaacaaaaagtaattatagccaagaaaaaagaaataatataattctagataatggatatttgtatgctgcatgtacatatagaattgttaagattttctcaaaggttgattcatttattgacgaagatgaaataagattatatcatgaagatatttctattaaagattgtaataaattaattaaaggaatggaaaatcaaataagtgatgaattatataaaaatttaaatactcactttttagaattagttgatttattaaatatcgaaaaagaaaatttttatttttcgaaaaatggtattcgaggatataaaaatttatgtttaagtgaggtatggggttctggtgtaataccggaaataatattaggaccaatgtgcgtacaaaataaaagtgagttaaggaaatttttagatgctaacggacttcaaggtacaaaaattagtgtttcaaaagttccgataagatagattaatggggctgtaacgagtaaataaacatgttatagtttcatattacgcaaaaagcgctcatttgagcgctttttttggtataatttagtcgatgaaaacaaatatatacgagacttattataacgcatatcaaccttatatgctactagattttaacttatcttttgatattgatatccctcatgatgatatttgtagaactgttcttgaagttacggaaaggattaatttatgtaaatatgttgacttctctaatagaaattctcatgggtatgatgcttttatgatgttcaatcttgttatcctagctaaagctctttttggttatgcttctaccagagacctcgaaaagctttgtcagactgatatcagatttatgtttatcgctaaaaatcaaaaaccttctcatcagtcttttcatagatttattcatgatgatctgactatgaatattgaagatattttttatgatatcaataagtatcttgaatcaaatatggatattgatactgatgttttatgtattgatggaactaaatatgaagccaatgccaataagaatacttttatctggcgtgccaatactgttagaaatagaacgaaaagatggaaacgaacacttaattgtattcataaaataaacaattatttttctagtgtcaatatatcaactcgatattcattattaaaagaaccaagtattgattatcttttaactatcagtgaaagattagaaaaatatatgctggatcagaatatacagatggtccatggaaaaggatgcagaaagccagttatccaaaaactatatgaggaattaaaagaaaatgccttaaagatgtgggaatatgctattcatatggatatgttacaaaaccgtaatagttgttcgaaaacagatcctgatgcaacatttatgcatatgaaatacgattactataatcatacaaatgtatttaaaccaggatataatatccaatttggggtaagtgatgggataataagaatcatatatattagtagtgatggaaatgatttaaaaacatacataccatttatgaaaaaatataaggaagcatatggaaagctacctaaaagaacaccagcagatgcaggatatggaagttatgataattatagttactgtaaagaaaacaatatcgagctatatatgaagtattcaggatattataaagagaaagaaaaagtaacagaaaaaaacagatataaatcaatacactttatcaaagatgatgaaggaaattatatatgtccagctggacatgcatttgaacttgaaaaggagacaatcgatagacaaggagaatatgaaagaataaataaacattatgtaaacagacattgtgaaggttgcccattgagaagcaaatgcaccaaaacaaaaaatgggagaacattggtacattgtgataagctggaagaatatcatcgagaggcaagaagcaatgtgacaagtgatgaaggtatcaagctgatgaagaaacgaagcaatgagtcagaggggacatttggagatttaaaatataatcagaaatatgacagattacgtcggcgaggagaagctggagtaaaattagagatatatttaatagcgataggagaaaacctaaggaaatatcaccgaaataaaatgaaagaaaaagaaaagaaacaaataaactaataaatttttaaaataaaagaggtagttctttttaagtgcgccaaaaagagtaaatgaatgagaaaaagaaagagtaaaaaggctaaaattttctcattcattttaatttacaaaaaaagagctgtaacgctctaaaatagttgaaaaactacttactcgttacagccccattaattcttttagtaggaaatatttctctatttccatcactatattcaattgtaatagtattattcacataactgattcttgctgatttatcattagaatcaatcattttaattgttttgtcatcaactaattctaaagttaagtaacttatatcaaagtgttttttaatccatttatatgctttgtattgagctattgtattgcaatgtagattagtattcatctttaataaagtccggatagtaaatgttatttacagcatcaataagagtgtttatatcaatatgtgtataaactttttcattaatatccattgcttctttatgaccaacaataagtttattaaatgttttacttatatttgcttcagcaagtaacggtacaaaagtgtggcgacaacaatgtggagtttgttctaatccatatagttccataattggtgtaaagtaactcacatagtagttgctatatctaaatcgtttttgtttatctgtatggaaaacataatcgatttcagatgattcataccaacttttcacaaaaggataaatatatttagaaataggaactttccttataccattcggagttttagatttaactacattaatgtatttttcatctaaatgaacatcttctttttttagttgtagaaatttctcaattctaagaccagtataaataagaattaaaatcatttgataatacttatcagaagccattgaccataaaatatcaatgtctttttttgtaaaaggttctctatttttttattaggatttttgtctttatattgattaatgtcaacatatcttgaataatctttactgcataaatcattcttcattgcatagttataaagctgattaaataaaatcttaatgtttttaagagtggggtagtttttaccacaagtatcaataactttttgtaaatcaccagcttttaaatctctaaatgttctttcatataatattgtacaagtattatatgctgctctatgtccattgatagtagaacgtgatgcattttcatattttggggtagaccatgcttcatagatttctcgaaaggttaggttacctacttctaaatcaaatggttgttcgtgataacgtgctaacatctgaagaccttcttctcttgtttttgcataaccgatgatggcatatttttgagtggatttaccagttttttcattgatttcatatccagtagtaatacgtaccatatatggttttctacgtctgttagcattactcattttaactacaccaccataactatttggggttttaagtttcttacttgtcctcatcagattcaactccttttggttggtgtgcataaatttcaatgatttcttttctaattttgttaatagcatctcttttttgaactttattgatatttggattttcattaggataatgttcataacatttttgaaattcttactcacataaacagtttaattcaaacaaatcttttcgataacttgattttgtttctgttagatgtttataagcttttgggaagttgtattttagataatcaagtctttcttgtgcataaataccgataggtagttcagcaccagtaagtattggataatatacttcgcctacaagttgataactaaaaccatttttatctttgataatcttttccatgattaatttcttttctttcattaggttcttgaatgattttattaaatgcttcatgacctaatactttttgtatttttgtaatgttttttctaagtgtctatttctatcaaataattgatcaatctgagtatttagttctcttattttcattttaagtggtaatacagaagttttaagattatctacttcatgtagtaaatttaaatactttttaatcattctattaatagttgtcttaataccattaataaatggtattacaattttcttatgataactttttgcattcatgaatgtagatggttcaggaatgttccaaaaatcatcatcagtaatttctcttgtgaattgttgaaaagtttgtttttcttttttgataatagtcatttgattttgaattgttgtgatattatcttgaagttcctgcttagttgaagttaatgattgaatttcattattcaactcattaacttcttgactagtgtgccgggcatggcattaattcagttggagataaactaaccactggtagttaccaccaagtgtagtgaaccacaagtcgttaacagtaatgttatggatggaggaagtggtgtagcgactcttttgagcgtacgaacagaaacttgatataaggctaaatggtggatgagattgctagccaaatcgaagtccaaaaggtaaacgtaaaaccaagacagtaaatcaagacgttgtgaaagagataggattagtgaattaccccgggagatcccttagacgatgaagtccaataaactttaaaatcagcaatggtaccatcggtcgaaaaaggttaactaagggaagtcagctgaggtcgtagtaggtatttcaccaataccaaaggacctaatgtttatatggtgttactcaccacaagcaatgtttggacagttcgaaatcgagaataatcctgtaattagaaaacgtaattctatgaggatgaaggcagagggaatggttccaaatatatttacaagagggaggagaaacaacaacatggaattaataaaagtgattttaagtgatgaaaacttaaatgaggcaatcagaagagtcaagagtcataaaggtgcagcgggagttgataagatgacagtatatgaaattgatgaatactttgaaaagaataaggaaagtatcaaacaatccattctagaaaagaagtataagcctcaaccagtgaaaagagtatatatacctaaatctaatggaaaacaaagaccattaggaattccaacagtcatggatagagtcatacaacaagccatagcacaagtcttaacacaaatctatgacagtcagttcagtgataacagttttgggtttagaccaaatagaagcgcacatgatgccatggaaagaacactagaatacttaaatgaaggatatgaatgggtcattgatttggatatagaagcatactttgatacagttaatcatgataaattaatttcaattcttagagagaaagtgaatgactcaacaacactacatcttatcaggaaattcttacaggcaggaattatggaaaaaggtttagtaaaaccaaatatcctcggagtaagccaagggagtccgttgtcaccaatattatcaaatatctatttagataaatttgataaggaattggaagagagagggctacgcttttcaagatacgcggacgatagtaatatcttcgttaaaagtgagatgagtgcaaacagagtcatgaagtcagtgacatcatggctagaaagaaagttatttctaaaagtcaatgcaagcaagacaaaagttgtaagaccaacaaaaagcaactttttaggttttacgtactttaagacaagttccaagtgggaatgcagtcctaacagtaagagtaaaatgaaattctacgataagtgtcgaaaggaactcattcgcaagaaatgtatttccaaatccaatgcagaaacatttactcgaataaatcaaatcataagaggatggattaactattttagaattgggaaaatgaaggtattcatagacaaattcgggcaatggttaagacataagatacgagtgattatcattaagcaatggaagaaaccaatgaagatttggaaaagtctacaaatgcttaataggaaactcccatataagtttagcgatgaacagatttattcagtagccaactcaagactaggttggtataaacgagcaaatggaaatgtcgtaaacctcttactgaatgcagacatattagccataagaaaagggaaccgaccaggattggtcaatcccctagaatactatctaagataagttgtattaacatataaatgtagcgccgtatacgagaaccgtacgtacggtgcaatgagaggggcgaaaataaattattttccctctactctattgcattttcttttggtactctaacacgctcaaatgttttcatgagttcccagttgtttccactgtacattgtatttttccataactttaggaagtgtttctttttcagataaaatccattgatttcattcagtattactacgtgtaccaccagtaaaaccttgctttgctagagcttgttttaatgatacacgagtatctggtcctcttttactctctgtaatatagggaataaaatcaatgtgtaaatgtggagtttcttcatccatatgaagatgagctgaataaacaaataaatttggatttctagtttggaaagtttgcatatattcatctaatatcttttcggcaagttgaccatttggtgactgagcattcatatcatctttattaccaatttgaataatcacttcataaaatgttttttcttgctttccagttcgtatcttttcgtaataatctttgattcttctttctggacgtttttgatcgttattatatcgtttaactgcttcatcaaataactgatgatatgcatcatgaatatccatatatgtatattcatgatttaaaacagtccgagaggaatcaacattagaagcaataaattctcgtctattgtgattaacacttccttcaccaaacattgcactgatgcttcgagagataatttcattcatttaaggagcctcgcagagcgcaagcatcttttgtttatgacaaaagtgcatttgcgttactttcgacaaagtaacaaaggttactaaccgaaagtatgaagtttgcaacattgcagtctttataaaccttgcaaacttgcaatgttaatcttatagcatccatatccaagcatcactttgccttattgatttgatatttagatctcttttggcagagttaagagttctttcagcaatactctcaactttagctaattcatatatttcagttgcagaagtggaccatcagccaataaatcagagagaaagttagtagctcttgatttttcggtttgtctagtttttccagcaagtaattcatcaattgtaacatttgttttgcctgcccaagagaatccattatctttacttaatttaaaagcaaatgattcacctttacatgctaaactatttttatcttgaacgactactcttgtttctgggtcatcctttaattcaccaacaaataagatacttcttgcagctgcaggtatatcaattgaaccaatacttttatatgttgatttaccatttcctttatttaagtgaccaattaaaacaatggcacattgatgtttaaggtcaatatcgccaagtttttttaataatggtcttacttcattagcacgatttaaatctacattttgtccaatgtatgcttgattggggtcaagaataaataacctagcttttaattttatgattgcttcttcaattctttcgtcaagcatagaaagtgatgctttatcttcattgatgtagtaaatatgattacaatcagcatcagcactcattaatcttggtttaatggtatctccataaccatcttcagcagtttggtaaatgatatttattggttctctttttatattattatcatcaaatggtaatgcttctcctttagaaagaagtgctgaaagacgaagaatcaacatcgtctttccacctcctgtatcaccttgaatgatggtaagttttccatatggaatatatggataccataaccattcaacttcagtttcttgaacttccgataaagatactaattctaattcagtaggattcatgcaatattctttctaaaatatccagtttcttcccaaacctttttatccggacagtaataattaaattctgttgaattgtcctttttaacagcatatccaaattttaatattcctttttgtaacccaatacgaacatattgagcatctttaccaatggcttttgctaattcgccaattggtacgtttctaccagtaaattccggtaattcaatatatactcttttttcttccatataatctcgtacctcctataaagagtgtttgaatgtgaaagaaaagtttgctataatgtcaaagaaagagcattataaaaacagttctttcgatacatactgttcattagacaaagcttggtcgtggcgtctagtgaactttttttatttttctttagcaagtcatcacctcctatggaataatttatgcaaaaggtaaattgctaatactatccctaataacactataacattgaggactagtatttgcaataataatttaaaaaaaattatacttttcactgttatttgataagtaaataagatataataacaacgaaaaggaagagtgatgattatggcttttagtgactttatgcatgatttgcgtgagcgtaatcaattaacgcaagctcaagttgcagaattattaggggttaatattaatacaatcaaacaaatagaagctaataagataaaggcaccgagtatgagggtgttagatagtttttgtgagtatttgaatgaagatagattgactgtaatgtataaaatattgtttagacgtgatgaaaatgtgaaatgtgatgacgaatttacaatttcacaatcagttttagtttctaaatttatgacgtatatgtatttagaaggatggaatattgatgaagttccagtaatttataaaacaaaggatataggggaattgatttatgcgggtcaattaacaaagaaaagagaaccgaacaataaagttgttattacatctatatctgcgtattatgatcagaaaattaaaaatatttgtaaagaagaggcaattagatttattacatcttctttagcagcatttttttgtattgattcaatcagtttgaaaggtatgtatgttgtctttgacaatagatataaaaatcaaagggagatttttaaaacatttgaaaagttggaattaaataaaattccatttaattatcaattaatattatttgatccggacaaaggagatgttgtaaatattaaagatttacgaatgtagaaaattgggaggatttttaaatgttattgaatagtaaaagcattcttgaatgtgatgaagttgaggaagaattacataataaagaaatagatggaataatggaaatgattaatcaattacctaattatgactgtgcaataatttttacatatatagatattttacataaaaataaaaaagaacaaatcaaagaatgtaaacttcatgaatgtttagaaatggttgaatatactgatttaaaaaatggcatggactttacaattgatgaaagaaatattatgaatattatagtttatgggcaattatatacaatacaaaatgagtatcattatgttaaaattgatataatgccttataacaatcaaagagaatttataagtatcgcagaatatatgaggccaatttacataaattagtaagttgttattagaatggaaaggagaaatttttgtggaaataaatcaagagttgatttatgatatgtgcataaacgacaagaagaattatagttctttagtaagaagcagtcgattagatgcatctatattaaataaaattgaaaaggaagaaaatatctcctttgatgaattaaataaagtttgtacacttttaaaaagtgatataacgcagttagtaaaaaagaagtgtaaaagagaaacaggtcaattaaaaacgatagaactatttgcaggagcaggtggtttggctttagggttagaaaaagctggatttgccagtttagggttagttgaattagataaagatgcttctaatacattaaaagttaatcgacctaattggaatgtaattaatgatgatattgctaatgtatcatgcaaggatttagaaacattattcaatgtaaaaaaaggtgagttagatttattatcaggaggatcaccatgtcaaagtttttcttatgctggcaaaagattaggattagaagacgcaagggggactttgttctatcattacgctgtatttttacataaattacagcctaagatgttcctttttgaaaatgttaaaggacttttaactcatgaccaaggaagaacttatcaaacaattcttgaaatctttgcaaaagagggatattctattcaaaagatggttttaaatgcttgggattatgatgttgctcaaaaaagagaacgtttaattacaattggaattcgtaatgacttagtaaataaaatacattttgaatttccaaaaccaaaagagtataaaccggtattaagagatattttattagattgtccaaaaagtgaaggtgctacttattcaagttataaaaaggaaatattcgaattagttcctccaggtggatattggcgagatatccctgaagaaatagcaaaagaatacatgaagagttgttggtatatggaaggtggacgtacagggattttaagacgtttgagcttagatgaaccatcattaacagtattaacatctccaagtcaaaaacaaacagatagatgtcatccgttagaagcaagaccatttactattagagaaaatgcgagatgtcaaagttttcctgatgattggatgttctgcggaagtataggacaacagtacaaacaagtaggaaatgctgtccctgtaaatttagcatatgaagttggattaaaaattaaagaaggattggagaaattataatgtggcttttatcgtttattagtgaagaagattttacaaatcatgttaagttgacaattgaaaaatatggagaaaaattagagtcttttgatataaaaagatttaataaaaatatagttgatccggttaaacttatttttgataaaactgtatatcgagcaacatgggatgaaattattagtaatgagatatttagacaacgtgataagtcaaataataatgatattggatattttcatcaaagaatatttcaatatattaaaaattgtagagttccagaaaatggaaaagaaggtggatgggatgttatatatgaaaacgttgatggcataacattacctgatggttcaatagtacatagaatatatgtagaaatgaaaaataaacataatacaatgaactcttcttcggccggaaaaacatttatgaaaatgcaaaatcaacttttaaaagatgatgattgtgcgtgtttcttagttgaagcaattgcaaaaaaatcacaaaatatcaaatgggaaactacagtcgataaacaaaaaatgggacacaaattaatcagacgagtgagccttgatcaattttactcattagttacaggtcaagaagatgcattctatcaaatgtgtttagttttaccaaaagtaataaaatctgttgtagacacaatggacgaaataaatattccgcatgatacagtcattgaagaaatcagatctttagcaaaagaattgaatattgagtctgaagatttatccatagcaatggctgtatacatgcttggatttaatgattataaggggtttaaacatgagtaaaatattataaggggttacatatggatgaagtaaaagttaaaatcaataattgtaataatataaaaaatggtgaagtaagcattattcgtaataagttaaatataaaatatggtattaatggaactggaaaatcaacaatatcaaaggctttagaattaattagccaggcaaaaccattagacgatttaaaacctttcgacagtttggaagatattcttccttctgtcaatggaggagaacagtttgaaacagttagtttgtttaatgaagaatttgtaaaagatgttgtattcaaagaagatgaggttattgaaaatgcatttgatgttttcataagaacacaagattttgatgaaaaacaaaatgaattaaacgaaaagttaaaaacattaacaattgatattaatagtaaggatattgtaattaatttaaaaagcaagcttgatcaactacgaggaaaattagaactaaacaaagataaaaaaagtattaaaaaaaacacgaattataaagctatattaaaaaaggaaaatatttttaatattccagaaggtttagaaaaatttgctccattctttagtgataacacagtttgtataaattggatagattggaaaacaaagggaaaaacttttgagaataaagaaatttgtccatattgtggggaaaaatttttgccaacgtttagtcaagatagtttagtgtttagcgatacttttaagaagacagaagtaaataatttaacaaaaatattagttgattttgagaatttaaatgattatgtttcagaagaaaagatgagtattattacatcttgtattaaagaacaaaaagatgagtcgacaattaatgctatattaagtgcttttttaacagagtatatttatattgaagaaaaactaaatacaattacaaattttaataaaaatatatatgatccaaatagtcctaagaaacttgatattattctaaataacatgaaaattgaaaagagtatatttaattatttagggtctaattcattttttgaggttattgattatatcaatagtaaattagatgaattaattcaaatagccatggaaatcaaagtggcaattggaaaattacaatcagtattaacaaaaacaatttctgcctcaattatagatattaatagttttcttgattcagcaggtatttcatatcatttatcaattgaagtaaattcaagtgaagaagcgagagctgttttaaaatatgttactaaagaagatgaatatagtgttcctaaaataagaaagcatttaagttggggagagaaaaatgcattttctttgattctattcatgttttattcaattagtattggtgcagatttgattgtattggatgatccaatatcttcatttgatataaataaaaaatatgcaattcttcatcgcatgttcagtaagcaaacaggattatatccgcgcagtttatacggtagaactgtattaatgttaacccatgattttgaaccaattattgattttggtattataaaaaaattgccactagatgctttggatatcaaatttatcagaaatgataaaggtatgttaaaagaaattccagtcgatttagaaaatgatgtaaaatcagtaactgagggattaaaaaaatatataaaaaacactgagttaggcatcattcatcgtgttgcattcttacgtaaatacattgaacatgaaggttctgatgaatatgaagaagcttataatgtattgtcttcgctcatacacggtcgactaacttgtacatacgcagatggaacaataattgatggtgattttgaattgaaaggcattcaagatataaaagaatggataactgattttgattatcaatctttaattgccaatgtatataacgaagaagcgataactcgtttatattttgaagaatcaaatagatatttaaaattacaattatttagagcattgtttgaaatttgtccatctaaagaaataaaagaggatgatgtattgttgaaatttattcacgaaagttatcacatagaaaatgattatgcttattatttagatgtgattaaatttgaaattattcctgagtttattatagatataattgatgagtatatgaaaaaaacatatgctgacgagtagtatccggttgtggtgaattcttctgattaagatacaagtaagatgcaaaagtatcaaaaaacgctcatttcatcgcatatactaattaaaataaagataatttaagacgttttgtgagtgaagggaaccttttgattccaggttcttcaacaatacaatttgatgagatttctcaaaagagaatctatgagtcaatagaccatgccaattttaatgatgtcaaaatgatcaaagaaagttatttatctttaaaagcaaaattagggagaataccaaaattaaaagaatttgaaaaatacggtgctattgatgttcaaagaatatttcaaaataaaaatttgggttcttatcatgagtttttaaagaaatatgaaaaagaatataaaattagatttaatgatttagaagaaaaatatttgaaatttatttctattaaattatcttctggtaaaagaatacaagaattagaagcaattaaactagcaatcaacagaaaaataaatttaaaacattttttaagcgataaaatgcagaatgaatatggaatagttatgccggagataagttttgagacaatagaaaatattttaacacagaattttgctacaggatcttctaaagatacatttaaggatattacaattattgatgaacaatggaatacttccaaaacttttctagctttgttaaataataaagaatttaaaaatcaagttttagaaattattgattatgcaataagtatatataaaaatgagtatattgagagatatcaagatacggatttatgtctttataaaaaatatacatatgaagatgtttgtcaattacttaattgggaaaaaagtttagttccattaaatattggtggctataagtatgatgaacatacaaacactttacctgtttttataaattatgataaagaagatgggattgctgaaacgattaaatacaaagatcattttattgatcaacagacattagtggctatgtctaaaagtaaaatgagattggatagcaagggcatggagatttttacaaaagctaaagaaagaaatacttttattcatatttttgttagaaagaataaagatgataaaatttccaaagagttttattatttaggaaaaggcaatatcatcacgattaaacaagatagtatgggcaataatgttccagtatgtgaaattgtttatcaattagataaaccagttcgaagagatatctttgagtttattgttcaataagctatattttttaggaaaaaattttcataacagaggtgaaataatgatagtatatcaagaaacaaaagaacagtttttaattgatgtttataatgatgaaattgatcaaaaaatagaaaaacaagtatatgaaaaattacacagaaagacatcaaatagtgagtacaattcgtggatgaattcaatgccctatatgtataaaattttaaataatgatttaataccaaaagactgtattatagcaattgaatataaagttcctaattctaataagagaatagattttatgattagcggtgaggatgatcatggaagagagagtgcggtaattattgaattaaagcaatggaaaaatgtaaagaaagtgactgaaaaagatggaattgttaaaacaaattttcaaaatggatatttagttgaaacaattcatccttcatatcaagcatggtcatatgtaagtttgattcaggattataatgaggatgttagaaaacataagattaatttaaaaccgtgtgcttatttacataattatcgccaaactgattcagacgatttgatggatttacgttataaatattatttagatagagcccctgtattcacccgtggagataccgaaaaattaacagaatttatttccagatatataaaaaaaggtaatccaaatgttatggcacacatagatggtggaaaaattaagcctagtaaatcattacaagaaagtttatcaaatatgttaaaagggaaacaagaatttgtgttattggacgaacaaaaaattacatatgagaaggctttagctttatctaataaacatcaaaatcaaaaacaggtctatataattcatggaggaccaggaactggaaagactgttattgctattaatatgttagtagaaatgattaatcaaaataaaaatgctatttatgtaaccaaaaataaagctccaagagaggtatatagaaaaaaattatctaatggaggatatcgtaaggtttatattgataatttgttcaaaggatctggtggttttgtaaattctatagagaataactatgattgtataattgttgatgaatcacatcggttaaatgccaaatcaggatattataaaaataatggtgaaaaccagattaaagaaattatacatgcatgtaaattagcaattttctttgtggatgatcatcaaattgttacaacttctgatattggttcaagtcaagaaataaagaaatggtgtgaatattataatgcaacggtttatgaagataaattaaaatctcagtttagatgtaatggcagtgatgcttatctttcgtgggttgataatgttttagaaatagaagagacagctaatgacgagttaaatattgattatgatattagaatttttgataatcctgtaactttaaaaaatgctatttatgaaaaaaatcaaattgctaatagatctagaatattagctggttattgttgggaatgggagaagagtggaagaaatagagcagatgtacatgaaataaagattggtgatttctctatgtcatggaattttaattcgactgatacatgggccattgatgaaaattcaattaatcaagttggatgcattcatacaagtcaaggtttagaatttgattatgttggtttgattattggagatgatatgcgttatgaaaacggaaagattgtaactgacttttttaaacgtgccttatcagataaatctattagtggattaaaaaaagcttataaagaaaataaagagagtactttgaattgggcagacattattataaaaaatacttatagaacattgatgactcgtggtcaaaaaggttgttatatttattgtacagatgcagctttaaatgaatatttaaaattaagattagaaaagagtaaagaatatgttagaaaaagtgaaaaaacaaattattaaatttaatcaggagagagattgggatcaatttcattctccagagaatttagcaaaatctattagtatagaagctggtgaattattagaatgttttcaatgggataataattttaataaagaagacgtttgtagcgaacttgctgatgtgatgacttattgcatattattggcagataaattaaatgtagaaatggaagatattattttacaaaaattagatattagtgaaaagaaatatcctgtagataagtctaagggtgttagtacaaaatatgataaattataaaggaattgaaaaatgagaaaacgcatttatgaaataattgaattagctaatgaaaatgataaaataagtagaatatatgatgttataatgatgagtactatatttattagtcttataccattagcgtttaaaactgatttttatatgtttcatattatagatgttatagcggttatgatttttattgttgattatcttttgcgctggggaacagcagattataaattgaataaaaaagggatagttcctttcataaaatatccatttacatttatggcgattatagacttggtttctattttaccatcaataactttgatgaatggtagtctaagggtattaagggtaataagactgtttagaacttttaggatattcagaatatttaaagcagtaagatatagtaagagtatacgtatcattagagatgttatacaaaattctaaagaaagtttaatagctgttggagtattagctataatgtatattcttatctcagctttaattattattaatattgagccagattctttcaacaactattttgatgctgtttattgggctacagtttcattgactactgttggttatggtgatatttatccagtaacttcattaggaaaagtgataacaatgatatcatctttttttggaatagctatcattgccttgccctctggtataattacagctggttttatggaatctataaatgctgagcattaatttttattgttatgtgttactaaattttgtatataaagctcatcataaaaacttcactatcagtataataatacagacagtgaagttttttataaatcagtttataatgtataattttgatgagataaccattataaattttttaataaaatgatacgaacaaagattctaattgagggtttttgtaaatatatttgtttaataaatagttttaaatttatttttatattttaatgacaatttttacacggttcatcatgacctaatctttttgcttcacttagagtaactctgtctgattctttcatacgaccacattgagatcttgaatgatatttatttccactgccactactaggaatataaacatatgtactactacttgtgtttcctgatgaagtagattttgttgtttgattgttttttgtagtagaggatttagtgctcgttgtttttttagattcctcttttttcttttcttcttcaatctttttttgtgcttcttgagctttgattttttcttcttcagcctttttttgagcttcttcagctttaagtttttcttcctcagcttttttttgagcttcctcttctgcttgcttttttgctttggcaagtgctaatgctttttgatcaataacttgaacattaacaatattactttcaacatcatctgtcttatattgaatagttatttttccttcatggtctaaagaatgaatatataatttttgattgtctatttttttaatttctataacattgttatcgcttatttgaaaatcatcaattttaattgtactatcatctggtgtaaactccaaattaagtgatttttcttcattgatatccattgttatttgactttcatttatagatatcttttcaatagaagatgagcaaccaaaaattgttgttaagatagatagacatataagacactttcccaaatatgttaatcctttttttattttttgattcatatataatcaatcctccctttacttataattatatatgaaagatatataaatgaaagaaatatcgttatataataaaaattatgtaatacagtttttttaatgatatttaatattgttatctttacatcattttatagctaaatttttgcatgtattatattgaaattcatttcattctttatctaaaataaactgtattaaatcatcataaaagtcagaaagtgaattttcagtataattgataattttatcttttaattgtttatcttcaataatttcaataaaatcatcaaatacaccaaaaacattaaaatcttctatagttggaatttggataaatatcttggcatttaaagctaagtccaaaaaaccatcaagtatgtatctttaggattatgatattataataacgaatattattatgatttgtttcatgatcctttcaataatcttactaatatttaatttaatttcaattgttttatgatttatgatgcaatcagttaattcatctgcaacttcctcaatagatttgttatcaataaaatactttgatggaatattttataatagtaataacaatcactaataaattcagttaactaatgatttttatacttgtttttatattcatcaattctataaatgacatcattttcatcagtaaaaacaaatctttcaaaaacatgttctgggtaatcttgtaaatcaataggaataatagcttgaacgttaagaaaagacaaaatgaattctaaataattaaaagaagatacagcaataacacattctttgaatattataaaatttttttaaaaagtcatatttgaattgacctcattcataatcatcagtacattatttcaataaattaatcttgcgtcatgtttaattttttatgaatttcagtatctagaacacagaagggataaacaaggtttttcactaatgattcccatacactagttttcccaatgcttgatataccaaataacatattttctttttcatctgctattatcattataatgtttgtaataacgaattacgatgattatttaaaaatttcgtatttaatcaatatatatttgtaagttattttatattataatgttcttatacgaaatgagggttgaaaatgttattaggaaattattttgcgaatcgtatagtcaatagaggatataattattatttaaaacataaagtcaataatattgtcaagaatggtgattgttattgtgggaccgttgaaggaagtgaaaattatcaagtgagtatcgaagtatcttctgattcaagagttattggcatgagttgtacatgtccgtatgctcaaaaaggaaaaaaatgtaagcatgaagcagctatgttatttgaaatttttggggttgaggcagtactaggtaaaaattatgaagaagacgaatatgatgatgactattattatgacaacgactattattatgacaatgactatgattttgatgatgaaaacgataaatatgtttatgaatcaagagaatatcaagaccatcctatcttaggaaagttagaattaaaatctaaatctgaaatcttaaatatcattttgcttgctttaaatgattctaccacatatcaaatttttgaaaatattatagataatgataatcgatatttagaaatagaaaaaatcattaaacaaaaactatcaatggataaagatataaaaaagagcgattatcaaataattgtaaaggctattaaaagccttaaacagtataaacaatacaacgaaatgattgatttatgtgaacttgcaatgactcaattaatcaatctttatagtaatacaacagttattcaaaatcagtttttatttgatttagttaatattttagaagagtgttcttcttttgatttagataaagtcaaatcagtttttcatcaactttgcattcagtataatcataattttatctatcaattgattgattatttgaacaaacagaactattcattgaattttattatccatgtatttgaagaaagaatagaggataagggttgtttttataaaaatgaaatcatgaaaaaatatttatatattttgtttcattatcaaaatgatcaattagatgaagctatcaaaaaatattatgatgatcaatcttttaaacttatattaatttatatgtataaggaaaataaaaattatgatcaggctgaaaaagtatgcttagatggaatacagcaaagtcattctgttgatttttatcgtttgctaatagatatttatcaaaaaacaaatcaaaagaataaattgataaatgtgttaaaacagctgctttatagaaaacaaggtaacgttgaatattataaacaattaaagcaattgtataatcaagaagaatggcaaaaggaaaaacaagaaataatcacttatttagaaaaacaaaacaataacattatagatatttatttagaagaaaagatgtattattctttaatgaaatattttataaaaacaaatgatgttattcaaattaagaaatatgaagatattttatttaaaaatgttcctaaagatataattgaattttatgaaaattatatttacaaggtattaaaaaaatctggaacaagagagatatatcaacaaatgtcttcttgtttaaaaagtattgcaagatatgattttgataaggcagaagatatttatcatcaattagaattattgtatccaaagcgctatgcaatgttagaagaaatgaaaatagaaagatctttatcagttcaattaattgatattatttttgcaattgaaaattcctctaatcatgtaacaagttattataacaagaaaacacaaaaaattgttttgctttttgaagaacttattgatcaaaacttaattgatgaaatagatgaaaattgggatcaatatattgcattgccatcttcatatgatgttcatgaatatcaaattatgcaagattttattcttaatctaaaaaataaagatataagagatcaattatggaacacgattcatggaaaaggtgctttttgtcgttttaaagatttagcggcacgctttggtgttcttgaagactggtttttgtatttaaatcaacaatacagaaaaatagctattaaatggtgtagagaaaacaatatcatatatgtagaatgaaaaatagaaaagcagaaaaagaggatgaacaagaagaaaatttaaaatacttgcaatcagtaaaacaaaaatcatgcataaattagagagaagttatttgaaaatttgtctattattgatgaatatgttatatttaatccaaatcgattaaatagtacacttttaaagcaagtaaaagaaatgaagaattcagtaatgataaactgtgtgattgttaaatatcaaaataactacacattggttatgggagaaaatgagactttatatggaattataggagcgcatgtaatcttgatgaaatcatttgagcacattttcttccttatatgtgtaaattgactcttgttccatacaaaggaaaaattatttatggtggttttattgaagggactaatattcatatgggtgaaggttttcgtttaacggttgctaaggctattaaaggtgcacaaatacataaatctttaccaattataatgaattaaagataaaatttagtaaaacttattaattaatagttaaaaataaagaaacttattatggctaaaaattaagtatatataaaattttgaaattaagagaaaattattgcttatatgttaaaaaaatatttataatgtatttactgaaataaatagggcagaaattgaacaagttcttttaggaatacaagaatacaatgaaagaccagagatattacaaacatatctcaagaatcatgaaataaatcctgaatataaagaagttcttaaacattggaatgaagaaatatatggacatatgtatataattggttttgatggtgattatgttacaatttattgtgaggaaacaaaacaactttatcaagttcaactattaaataaacaaataaagaaatatttaatcaagatacatgtttatcaatcagtcttaaccagattagttccaatatattaacgaaacaatgtatttttagttctagaactttaaataaagatttgttttaaaaatatttttagattatatagggccactatcaccgaaaaatatggatttggaaacattaaattcatacgtcaaaatctgttatatgatatggaatagtgaatttacagatgaaattgctttatcaaatttctttgatgaaaaacttgtcccttttttaaagaaagaaaaacaaaatatttttctcaagttgatagaattttaatggattataagattcaatacactgataatggttttgaattaataatagaaagtcgtgatacatcgtgttataaatgaatttttttgttataatgatagatacattttttaccgaggtttatgatagggacaagcgtgatttagataaatttatatatgtatattaagcaatgatataaaaattgtaaaagatagtattgactgaatggactaatagtcaacaatatccttttttagattaggcttatctgacttttcaattcttcaatgattgctatatcttttgtttttaaatagaaaagattattattttgtatgtcaaggtaacttgaagaacttgtccataattctttttcatcaatgagaattgcatttatagatatgttgctttctaaaatgcgagtacttattccttctaaataatgagttgtatgatcatcaaaagatttatttgtacaaatataaattttaattccttttgtatataaagagataaggaatgagtaaattctctgtattctattaattttacattcattagtgaatagaataagatttttgtttgcctgattcattgaagcgtgcaaataatattaataggggataaataccaatagatttgtttggtttttgcatatgttctaatattatttctgttgttaatgtttgatattgattatgtaagcattatgaacatattttgtttttagtaagaagacatagttttttattgaatttatttatatagataggtgagtattgacatttgcttttctttttatttgaattttatcaaaggctaaacattcattctatttttaaagtaatcggtagatacattcatattcatgcatcgtcctttatttaatatataagatataaacatgttcgaattgtttatactacttttaagttttttattttcttcttttaactttgtgagttcatccatattaaatttttccttgattaatcataagtcatttaatatatgtttttattattatataatatcaaactatataaaatgagtttatcaatttaaaaaagtgtttacagatcagatgaagtatgatacacttatcaatagagataagtgtattctaatataagagaatttaaataacaataaattattattttgaaataactacataaaaggagtatatggttattctatttataaatatcaacattcgatgtttttctcttaagtaattatacaacttatccagaaaggaggcctataaaataaaaaagatattcgtcttaatcttgccggacttaacgaatatcaccaacaaaggcattcttattatatgttttaaaagttataatgtcaatattatgaatagataaaaaatgtataatagaatgcctctcaaaagtaattaaatattaattcacataggaggatataaaatgcatattattatttatttatttaaaataacaaaacaaatttttaaattattaaaatcaaaaaagtatactattacgtataatcagttttatgtatctaattatgaaaaatgtagttttaatgatctaaattcaatgaaaggtagattattaaatcaaaataactataaaacaaatatagctattgacaatagtatggctaagtgtttagtggaaaatatagataaactcaatgataaagagtgtttttctattgaagaatgtaatctaggtcaattagatttgatgcaattaagtaacaattttttggaagactataataataatttattaagcattgaagatacagctgaaaaattacacattagttcaaaaaaatttctattttatttactgaggaatgattttatttatcaagattcaaaacatggatatttaccttatcaaaaatatttgatgggaggaatatttaaactgaagccaattggattattacctaataatattttttattttgagatatttataactttaaagggtatgaaaatgttcaagatgaagttgaatttattgcacaattataggttctgatgagaattctttattatttctcatgagaatatattagatatacaaaaaagattgactattaataaaatgttcaggtatgtattctacaaaaaatgtataattaggaactaaaggtatgaaatattagtttttcatgccttttactctgtaaattattcaaagagaaaaatattcgactttttatgtgcatctagttaataaattatatggtttacatatttttatttcaataaaaagtgaaaatgatgatcactttgatttaaaattatattttgaaataaagattgttagtgaaattgtttggaattgatgtgaattaaataataacatatgatgttttgaaatgcacaagtactgactttattattgaactgggcagaacttataatattaaaatataatatctagagttatatttaaagtcttaaagaagatgaggaaaattgaaaattaagaaaatttttgaatatccacaatccacaggtagaatttaaaattttagttaaacacctacgatattaatcctagatgctcagcgatgcagattttctatttgatttataatgaagttagaactcagatggaggtattcttatatgtcaaataaagtattagaacctaaaaaatattcttattatcatttcattcgaatttattcagataatattgataactgcattgaactctttaaattcatgaaatgacctaactgtttttcatgtgataaatgtgattgtcataaatattatttagttaaatgtgtggctaaaatataaacttcttatttttttgagtacacggaatgtcataaacagcattttctacttttaggtattatttttcaatattgtaaccttgatttctataaataattatcatgtattttgttttttcaatgaaaccaaaggattgaccgcaatcaatttatgctcaatgcttgatatcaattataaaacagcacttcttctagaagtaaaacgtagaattcttatgtcattaagtaattcaaataaacggcttggaagttatttctatgaagctactgtttttaatattggtgaaaaatcctagaataaagcaagtcgtgtgaatgaacaacaaaaaattttaagcattttatctattgataaataaaatagttatccccagcatgttaagttgtagtggttcgaacccttttttattgaatatatcaatatattttttgccaccttttcagtacctctctaacttttttgcttttttccaaaatactattgatttttttgactgatcatattggttattttatttatacgaatttcttattctaaatagtaagatagctaaaatatcagaattttatctattacttttcgtccttgatctctaatataagtctattaaagactatgcaggtttatcattagagagaaatatcaaaagatattgtgtattatctcatggtgcaatacttaataaagatggtaaaaagagatttagtatattgagaatcaaaatacaggtgaaaaatgaaaaaagtaaactatgatgaaaataatcataggcttttctgattaaatacaatcattggtaatattaaaaataatattgcaggaatgtatcatagagtaactaaaagagatatgcctttatttatgaatgaatagaaatatagattcaatcatagatatacaggaaacaacatgctgaataaagtaaaggagtatttacgaaaattatttccaatcgatcatagacaaatagtatatattttaaatatttcatcaaattatttcatatgtgctaacaattaagaaatttacttacctgtagattgtgggtattcaaaagaaaatttaatttatttagaagtttgaaaagaatgttttcttggataaagatgtgataaaataaaagaaagaaaaggttaaatcataaagtataaatttataaatagaaatgaggaaaaatgatgaaagtatatgaatataaagtaaaaataaagttaaaaaacgatttacaatattatgaattacctgataaattgagctattttattgatagtactttaggagaaaatgaagaatttctaaagtatcacggaaactcacattataaaggttatgttcatgattttttgtatccaatagaaagtaatgggatttatcaaaaaaataaaatttatactatgcgaataaggatgatagaagaaaaattagttcagtatttaatgggaaaattagcttttcatgaaactaatgaattcatagcaataggaggtgaaattaaaattataccaaaaagaaatattcaacaactttattctattacgcctgttattttaaagggacctgggcaaggttattggagagattggatgactcttgaacagttcgaaaagaggttgaaagacaatttaataaagaagtacaaattttttacaggaaatgagctagatgaaattttttctctctacaatcttattgaatttaaaaataaggtccctgtgaaagtaccttataaaaatatacgattattaggtgataaagttatcttagaaattgctgataataaacaagcccaagagttagcttatttggcattgggagttggcttgttagaaaataatagccgtggttgtggttttgttaactttaaatatatgtaaaaggaggtgaagatatgttacaagaagcagtagaagtttttgaaaaaaaattaaaacaaaatagtagaattgttgttgattctcataccttaaaggacggtacatatagacttattgaaataggtgataatgatgactggaagattttaaaaactttagatatcttttttgataaaaaagcaaaagaagttgttggacatacagatgaagattatttatttatcaaagagcttgattattacagtaagcttttagaaatgaataaacccattgatcctaaaaaaattatacatacgaataattatctttctcttgcagtgaaaaaagatagtattgttactaataaaatcactcctgaagttataaaaaacttttttaagatacttaaaaatcctatagttaagtatgagaagaaagctaaatcaagggaactgtatcaaaatgttgaagaacgtcttggtcaagtagatgttgatttacttgaaaaaatagaaaattatgttttgaatcatgacatctttaatggtattgatttgactaagaaaaattatgtaaaagtgttctttgtatttgtagatagagaaaaaacaataaactattataagaaagaaggagagcgatatttacttcctaatttatataatagtaatgattataattttaatgacaatggtatgattataggattgcctaataataatatgggaatgaatgctaaaaaaccttttttagagaataaaacacgtaaagttaaagttccttatttgttagatcaacaaaaggcattgttacaatcgcagttgtttgattacttattaggtgcagtctctaaaggaaggtacaatttttatgttaataactttgaaggaaaggaaaatatcagcggatatacagatttagaagaacctgatgatataataagtgggtattatttgagatgtcgtaaagaaaaaaatgaagttgaaattgtccacgctgataatataacttgttattcaaaaacattaaaggagccatttattcttagaaattatataggaatatcacaagaaattatagataaatctatattaaactatgatgtaatgatagatgagttgtggcaagttcgacatttaatagatagtattttctttgaaggtaaattacaatttaatctttatagtagggttgaagatattcaaataaatgatgctgttttgaaaagatgtatactagaaaatagagctactttagcagcatggttttatgagggaaaagataatcaaataaaatcatcggttgataagttttcaatggaacttattaaaaatgcaattgtcaaagatgaaacttttaaagcgcaaagacaatttaatttaagatggtctttattatcatattttagtgatgaaaggagaataggtgaaaatatggaagatatacaggaaaagttaagaatgcatatcaattcaaagaaaggagaaaaatgggagtttgaggatgatcaagaattttcatatgcagttggccaacttgcagaatattttttatcattaaataaatcaaatagtaaatcttcagcatatattaatacatttttaaatgctaaaaatatttctttaatgaagaaaaaaataataaattcatacaagaaatataattatataatttctccaattgagggaggaagagtgcaacaattaattgaacatattatgttatatgagcctcaggaattgaatgctgagtacattttagcaggatttagtgcaacaatgttagtttatgaaaagaataaggaggaagacatcaatgaataaaagagtatatggagttttaggtgtaagcgcgattatggctaattggaatgctgattttacaggatatccaaaaacaacaacaaacggagacacttatggtagtgataaagcatttaaatatcctatgaaaaaaatgtgggaaaatcaaggtgaaaaagtactttatattaaatcaatgaaactttcaccagataaaaagggggaagtcaatttagttcctcgcagtttaaaagaaagatatgaatatttatttaatattgatgatttaaaagattgtaaagatacttcagaagttttgaaaaatttatttagtgcgattgatgttaaaaattttggagcaacttttgctgaagcaggaatgaatatttctattccaggagctgtacaatttggtcaaggatttaataaatatagagatacagaacctcaagaacaacaaattctttcacctttccgtgatgctactaaaacaactgatgaaaatggagaagctaaaaattcaactttaggtacaaaaattgtgagtgatgaagcgcattatttttatccatttgttgtgaatcctgatgcatataatgaatttgttaaactaggagtaacagagggttatactgatgaagactatttaaaatttaaagaaacttcacttgtttctgcaacagcatttgtaacaaactctaaagaaggatgcgataatgaatttggtttattcatagaaacagataatcatctttatttacctaatttaacagaatatatcggttttgaaaaaggtgataaacaaaatacaatcaatatccatttaaaagaaatcttaggaggattagaatctcaaattcaagtcattgaaatttattataatcctataacaacaatcattaattgtgatcttgaaggagttaaatattttaatattgtgactagaaaagaggtttaatatatggaagctttgaaatttattttaaaaggaaaaacagctttctttaaaaatccagaagtcaatacctactactattttacatacggaaatattcataagccggctttacttggactttttggagctatattgggctatcaaggttatgagagtgattttgatacataccctgaatattatgagaagctcaaagatatctctgtttcaattgttcctaataaagaaaatgggcatttctatagaaaaattcaatattttaataattcagtgggatatgcatcgcatgaacaaggaggaaatctcattgttaaagaacaatggttagaaaatcctgaatggactatatatgtccaaatcaacaatgaggaaagtcaaaaattggctcaaatgattttaaataaacaatgtatctatacaccatatcttggaaaaaatgaccatcttgcaacaatagaagatgcaaagttaattcaacttcaagaacaaaaatcttcagatatacaaattcatagtttatctattgcttcgatgatacagtttcattggcgaacagcaatgtttaaatatgaagaatatttaccaatatctttaaaagaaagtaccaatcattatcaattagaaaaaatgcttttaaccgacgcttcagttaaggaaagtgatatactaatatacactgatggagaaaaaaatgttaccttttattgattattatgaaattataaatgaaaattctttattctatgcacatactgatggtgatagaaaagaattgttaaaagagcatattgatagatgtcaaaattattttcaaaaattgtatgatgataaaggtatagaaacaattatcaaaagatttcatcaaaatttgcattttcaaaatgagaatgcaagttttgactttctaaaagaaatgttaattcaacttgtaagctttcatgattttgggaaaatgaatcctaaatttcaaaaagtgaaaatgaataatcatgttggtaaaccatatggaggattaacagaatcagaacattcatttttttcatcgattatttatttggattattttcttcataaattatcaataagcaatcaattagtatctgatgataaatatatacttgaaagaataatcatagaacatgcatatattattgcgaggcatcatagtgatttagaaaaactttcacaatttacaaagcgtttacaagaaatgcaaacacaatacctcattaagaatttattatccaatccattaaatggttataaaggattaaaatatataaatgaaagaaaactgaaattattagttcttcatttttatgatgatcaaccaaaatactcatttgaagaattaggaattcactttttctattatcgattagcttattctcttttagttgcaagtgattactatgcaacaagtgaatttatgaatcaaaaagaaatggatatattaggtgattttctttctattcaagactttcaaaaagaatataatcaaaacaatttattaaaaagtattagaaattatgaaaaaaataaatatcagggtcaatataagaatttttcagatataacagagattaatgatttaagaagtgaattatttttagatgccgaagaaagcttgcaaaaaaatttagatgaatcaatttattttttggaagcacctacaggaagtggaaaaagtaatacagcttttaatttaagtttccatttaatgcagaatagaaaaaaattattttatatctatccctttaatacacttgttgaacaaaataaacaaaatttaaatgaattatttcctaaaaaagaatatcaagatcaaattgttgttgtgaactcattaactccactgcctaaaaattataagaaaaattttgatgttgaagattcagatgaatattatcaaacattactactagatagacaatttttaaattactctgttgttttatcaacacatgtaaccttcttcaatttgttatttggctcaaagaaagaagatgtcattggttttcatcaattagtaaattcagttattgtattagatgaaatacaaagctataaaaataaaatatgggctgaaattattattatgttgcaagcttgtgcaaaattaatgggaatgaagataattattatgtcagcaacacttcctgatttagagaaactttctggacaaagtggggtagttaaacatctattagatcagcctcaactttatttccaacatcatttgtttaaagaaagagtacaactgcattatgaattattggatgaaaaaataacattagaaaaacttaaaaatcatattattcaaaatcaacagtcaaataagaaaattttagtagaatttatcaagaaaaatacggcatatgaattttataaaatgttattggaatgtgaagatataactgtagaagtcaaatgcttaacaggtgatgactcattgatagaacgcgaaaaaatcttagctcctattaaaaaacaggagaatgtcggattgattcttattgctacacaggttatagaagcaggtgttgatattgatatggatattggttacaaagatatatctctattggatagtgaagaacaattcttgggtagaatcaatcgttcttgtaagaaaaaaggagatgtctatttctttgaccttgatcaatatcaaatgatatatcgtggtgattttagagtagggtcttctttaaatcttaatgataaagatatgcgagaaatccttttgaataaagacttttctgtatattatgatagagtaatgaaaactatacaacgaaacagaaatcaaaatacaaatgaagatggactggattgtttttttaaacaaaaagtttataaattagatttcccagaaatttcaaagactatgaaattgattgatgatgatttttggtctatagatgttgttttatgtagaaaaatagaattagaagatggaagtgtcttagatggttgggaagtatggaaccattataaagaattgttacaagataatgacatggattattctaaaaaacaggtgaaattgattgaggtaagaagtcaattaagttattttatttataaattaaagggtaatgttgatatgcaatacaatgatatcattggagaattgcgatgcatagaggatgctagtgactattttatagatggaaaattggatagaaaaagaattggtcagttgagttatgattttttataatagtgatgtcatgaagcaacaaagagaggatgtctttaatgaaaattaatggaatattaatgaattattacattcattgtccaagacaatgttatttacatggacaacgtcttaatttggaaaataatagtgaagatgtaaaggttggaaaagctttgcatgaaagtaaatatatgaatgatgataatgcagaaatagcaatagataatatcagactagataaactaacaaaggaatatcttactgagacaaagaaaagtgatgcggatgtcgaagcaagtcgatggcaattgattttttatctttatgtattaaaacaaaaaggtattgagagaaaaggaaaacttgaatttattcaaaagaataaagaaaaaaagacagttattattgaattagatgaaagtttagaaaatgaacttttattaaagatggatgagataaagaaattaatcaatagtgataaagttccagaagtcatagaaaagaaacaatgtaaaaaatgtgcatattatgattattgttatatataggagataaaaatgggatcgacaaaatatattacaagtatgggtgaattgagtcgtaaagataattcactttgctttcggaaaaatcaaaagaatgtttacctaccaatagaaaatattaaagaaatatattgtatgaatgagatatcaatcaatacaaagttattagattatatttctagcaaaaacattgttattcatttctttaattattatggtttttattcaggaactttttatccacgtgaacaatataatagtggaagattattggttaaagaggtagaagcttattcatcagaaaaaagaattattattgctaaaaagatagtcagtgcaattgcagttaatatagatgaagttttatatcattattataaacataagaataaagaagtaaaaaagacaattgattggataaggaatgattttaaaattcaattattagaacttgatgatattcaacaaattatgcttttagagggtgaattatggcaaagattttattggacttttcaatttgttttaccaactgactttatgttaaataaacgtgtgaggagaccacctgataatccaatcaatgcacttatttcttttggaaattctttgttatatacaaaatgtatttctattatctatcagacacatttaaatcaaacaataagttatttacatgaacctagtgatggtagattttcactaagcttagatctaagtgaaatgtttaaaccgattattgtttttagaacaatttttgatttagtcaataataagaaattacgagttaaagatcattttgaaaagaaggttaattattgtattttaaatgaagaaggaaggcaaatatttattaaagcttttgaagaaaggttggataaaacttttcttcataagaaattgaatcgtaaaatgacttataagactgctattaaaatggattgttataagttgattaaatatttgttggaaggcaaggattttgaattttattcattgaaagaaggacaataatgaagaaaaaatataattataattatgcaattgtattttatgacgttggtgaaaagcgcgttcaaaaagtttttaaaatatgtaagaaatatttatcacattttcagtattctgtttttagaggtgagattactccttcacaattaatttcattaaaaactgaactaaataatgttatcgagcaagatgaagattttatttgttttataaaaacatttaatgataatgtttttgatgaagaaattcttgggaataagaagtgtgaaagtgatgaattgattatataatttaccaactgtatttttgaaacaggagaaaaagtgttgataataaggtcataattttgattaattgataagtttttaaattttgatttttacttggtaaaaaattgaaataatgttgattatatcatcgatatttgatattatcgatttgtaaaagtgtttattttacttggctaaatagcaacatatgatgttttgaaatattgcactagcaaggctttcaagtaaaccaagtacgctaaatagcaacatatgatgttttgaaattcatcagacagacgaaccctcaacataaattccttgctaaatagcaacatatgatgttttgaaattttgatataaacttattcttagaaattgtataataagctaaatagcaacatatgatgttttgaaataaaaacgagagagatttcctttatgaatgccaagttgctaaatagcaacatatgatgttttgaaatacatatcagcagataacaaacccattttaataccacgctaaatagcaacatatgatgttttgaaatgcttccaaaatgaagtgtcgcagaatgttgtgtacgctaaatagcaacatatgatgttttgaaattctttagaatcatccggattaggactaggtatatctgctaaatagcaacatatgatgttttgaaatcagtcaaagacgttataattactagatatacaaggcgctaaatagcaacatatgatgttttgaaatagattagaaagattctttctaactacacgactaacagctaaatagcaacatatgatgttttgaaatatggatgacttaggggaaatcaaagtggtacctttaggctaaatagcaacatatgatgttttgaaataaaaatcagcaactaacataaagagattgtaatttgctaaatagcaacatatgatgttttgaaatactgccattgctgatgtaaaagaaggttatcaagctgctaaatagcaacatatgatgttttgaaatattcagtattgtaacgtccgccattttgtttcctaagctaaatagcaacatatgatgttttgaaataaagcaacatgtgatatgcttgttgttcaaatttctgctaaatagcaacatatgatgttttgaaataaggcaaagacaggtggaataatgagcattgaagcagctaaatagcaacatatgatgttttgaaatttgcataaattaatttaatgaatgatagcatactcagctaaatagcaacatatgatgttttgaaattgtctttagactatgttacaggtgttatttgggcatgctaaatagcaacatatgatgttttgaaatgaaaatatatctactaatacatttgcgagattatgtgctaaatagcaacatatgatgttttgaaataagacattatcatgataattaataacatctttagaagctaaatagcaacatatgatgttttgaaatgaggatgtagaggtcctggacggcgacaatatcgacgctaaatagcaacatatgatgttttgaaattcgtctatgctagtcgtgtatgaaaagctagaaagtgctaaatagcaacatatgatgttttgaaatgaagaataaaagctgggttgatattcttaaaacaagctaaatagcaacatatgatgttttgaaatccacaaatatgtttgaatcaagatttaattggatggagctaaatagcaacatatgatgttttgaaatataaggagaaaaataggacttaaaagaagctcaacaagctaaatagcaacatatgatgttttgaaataagaaatgagaagatcgatggatgaatttttaggcaagctaaatagcaacatatgatgttttgaaatagtagaggtgctataaaggcagtctataaaattgttgctaaatagcaacatatgatgttttgaaataattactgacgttcgttctaattcttctgttgatgagctaaatagcaacatatgatgttttgaaataaaaatgtcttatacggatttacttttaataagaaagttaaatagcaacatatgatgttttgaaatacgaaagaaagataaacatcataaagttgcttaaggctaaatagcaacatatgatgttttgaaataataaatctgatatttttacatctaatgcgatcgctgctaaatagcaacatatgatgttttgaaatacaagttctatattattatctttatagataaaactgctaaatagcaacatatgatgttttgaaattcagtcttgttacatcttttttcttcatttcttatagctaaatagcaacatatgatgttttgaaattactaaaacagaatacaaaagatttaagaaaaagttgctaaatagcaacatatgatgttttgaaattgtatgatcatagatttttctcaatcgtagacaacgctaaatagcaacatataatgttttgaaatatatttattccatttaatttaacacgaaaaagtggcgataaatagcaacatatgatgttttgaaattaaattaacttctgtctttgttttctggttacaatgctaaatagcaacatatgatgttttgaaatttggcattccatgcaatttgcgatagttgttacaagctaaatagcaacatatgatgttttgaaatgtcaaacggacacgcaacataaattccttagatttccgctaaacagcaacatatgatgttttgaaattgatttaggagaaacaattatgatcatgcttggaaagctaaacagcaacatatgatgttttgaaatctacgaatgcaacaaaccgtataatctaaataagggctaaacagcaacatatgatgttttgaaatataatctgcgcttttgtacatcgtttagttcattaagctaaacagcaacatatgatgttttgaaatatcaaggtatctgtaacctttggagtgtcagacacgctaaacagtaacatatgatgttttgaaattaacgagaatagttaccagcgttaacatttaatattgcttaataacaacatatgatgttttgaaattgtaacaaccatgtcaggtggttggcaaggttgggtgctaaacatcaacatatgatgttttgaaatctcattatttttgttgtttctgaatttggtgcaaagctagacagcaacatatgatgttttgaaattttataaaacaatctgatatagccttacctgctccgtttaataacaacatatgatgttttgaaatttgattgttttgatgatattgcctttactgtcatatgctaaacaacaacatataatgtattgaaaccagaagaaacaatgaaaggttgagtgaaattacatgcaattactaataacatatgatttaagtcttattaaatattttaaacatttattgcttattataatgtatccatgttacaatatgcctatgttaaattgaaaggaaacgaataatgagtaaagtaaacaaattaggacaatacaaaggtattgaagtcaatgtagaaaaacatatagctacaaaagaagaagttgaacaacaagttcaagctttagttgcgcaaaatccaacattagtagaaaaagatggagaagttgcacatggtgatatcacaacaattgattttgaaggattcaaagatggtgttgcttttgatggtggtaaagcagaaggacatcaattagagattggatcaggtcaatttattccaggatttgaagatcaaatgattggaatgaagaaaggtgaaacaagagatttaaatttaactttccctgaagattatggaatgcaagatttagctggagctgatgttgtttttaaagttaaattacataaaattgaaaataaacaagagtcagaattaaatgacgagtttgttgcttcattaaatttaccaaatatgcaaactgttgaagatttacataaacaaatggaagcttatattcaatctcaacatgatcaaacatatagaacaagtgttgaaaatgctatttttgaaaaattattagatgatagtgatgttgaagttggtgatgaagatgtagaaaaagcaatgaatgaacatatgaatcatcttcgtaatgaattagctagacaaggtatgactttggaacaatatttacaaatgacaggtgctaatgaagatatgttacgtcaacaattagaacctgctgcaaaacaacaagcaaaatttgaagctattattgatgaaattgtgaaagttgaaaatttaacaacatctgatgaagaacttgatcaacaaattgaagctattgctaatcaaaatcaaatgacagttgagcaagttttagaacaaattaataaagaagcattaagacatgattataatcgtgtaaaagcaagtcaattggttattcaaagtgctcaaattaatggataattgatataaaaataaaagaaacatactcaatttataaaagggtatgtttttcattatataaattattatgttgaaaaatgtcgaaattaatgagaaaattaaaaaagaaagttggtgatatgatgaaatttgaagaaagagtattaaaacatgagtttcaattgaatgatacagatgatgaaatcattgcatatattcgaaaaaacagacatcatatccataaactatctatccaaaaagtagcaagtgatttgtatactgttccaaattcagttatgcgattagcaaagaaacttggatataatggcttttcagaattaaaagttcttattcaacaagaggataatagtgaagaacaaatttcaaaagcaaaaattcctacaaatgttataaaaacaattgagttaattaattatgatactttatatgaagcttcaaagaaaatgaaaacatgcaaaacaattcattttttaggagttggtgattcattatcatattgtgaaatgatggttcgtcatatgcgttgtattgataaacatgctgaatattaccaaagttatcatgatatagattttcaatcacgacattgtgacaaaaatgatttattatttattattagtgcaagtggtgaaaatcaaagactaattgatgttgcaaaagatgcaaaagaacgaggtgtagcaactattagtgtaacacactttaataaaaatggtttaagtcaggttgttgatattccattgtatttttatggtgagcctagaaaagtgaatgggtacaatgtcaatgatagaactggcttaatgatcttattaagagaattaagtgaagtgttttggagaacttactgtgtataaatacacattatgttctctttttttatgaaaatagtggaaaaatgatgaaaatcatgtgtataaattttaatgtgttatgattgtaactgtaaaagatgacatgtcaaaaatatacgaaagaggagaaaaaaatggaattatctaaattaacgaatgagtcattgataacattaaacagtgatttgaaaacaaaacaagaagttattcaatatttagtctcacaattatatcaagaaggaaaaattagcgataaaaaagcattcttagctgctgtagaagaacgtgaagggttaactcccacaggaattgattcaggtttagcaattcctcatggaaaatcatctgctgtaaaaactgctttttttgctgtagttatattaaatcaaccaattgaagattggaaaagtgttgtagaaacaaataaagtcagatatgtattcttattagcaataccagaaaatgatgaaggatctacacaaatgcaattattggctgaaatgatgacaaaaatgtcaaatgaagcatatacaaacagattgtttgcctctcaaacaactgcagaattctaccaaaatttagatttcaatccaaatgctgatgaaataaaaacttttgataaatctatcgttgctgttacagcatgtgctgccggaattgcccatacttatatggctgctgaagctttagtgaaagcggggcaagaaatgggtgtctctgtatatgttgaaaaacaaggagcaaatggaattgaagatcgtcacacaaatgaaaaattaaaaaatgcaacagctgctatttttgccgtagatgtagctgttaaagaagaagatagattttcacacttacctatttttagaacaaaagtatctgccccattaaaacaagcaaaagaaattattcaacaagctttggatatggcagaaaaaacgaaacgtggagaatttattgaacatgcagataaaacagaaaaaggatttgttgaaactgtaaaagaatcagttttaacaggaattagtcatgttattccattaatcgttgcaggtggtatgattgctgcaatttgtgttattggagcaagactatttggttttactgaattattaaatactgagggtacttggttgttccaaatcaaagcacttggaagtacacttttaggaacattgatggttccagtgttgtctgcttacatggcttatagtattgcagaaaaacctgctcttgctgccggatttgcagctgggttatgtgcaaacatggttaatggtggattcttagttgggatgttaggtggtatcttagcgggttacacaatgagatatctcaaaaaatatattcctgcaaaagggacatttgctggttttgtaagttttgttgtttatccagttttatcatgtttaattgttgggattgttttattacttattttaggtcaaccagttgcatttattaattcaacattagttaatttcttaggaagtttatcaggaagcaatgcagctttattaggagcagtacttggaattatggtttcatttgacttaggtggtccagtgaataaggcagcttatgcattctgtgtagcagctatggctgaaggtgtattaatgccatattgtgcttttgcatcagtgaaaatggtttctgcatttgctgttacttttgcaacaaaattcaaaaaggatttatttacacctgaagaaagagaagttggaaattctacatggttattaggtttagcaggtattacagaaggagcaattccatttatgatggctgatccagttcgtgttattatctcactatgtactggttctgcagtttgtggagctatcgttgcaatgtttaatattggattagatgttccaggcgcaggaattttctcaatctttgttttaacagctgacaatatgccagttgctatggcagtatggttcttctctgctgtattaggtgcaattatctcagcagcattacttattgagacaagaaaacaaaaattaaaaaaagcgtaaggagatgtgagatataaatggcaaagcaagtacacatagttccacatatgcattgggatcgtgaatggtatttttcagccgaagaatcaaaaatcttattaatcaataatatggaagaaatcatggaaaggttagaaaacgatcctgattatccaacctatacacttgatggacaaacttctgttttagaagactatttaacgatgatgcctcaaaataaagaaagattaaagaaacttgttcaagatggccgattaattatcggcccttggtatactcaaactgatgaaatggtcgttggtggtgaatcaattgttcgtaatcttctgtatgggcataaagattgtcaagaatttggtagttgtatgaatataggatatttacctgattcatttggacaatctggacaaatgccaatgattcttaatggatttgatattcatcgcagtatgttttggcgtggaacaagcgaaagaatggggactgataagactgagttttattggcaaagtgatgatggaagtcgagttttaacacaacttctaccattaggatatgcaattggtaaatatttaccaactgattttgatgagttaaaaaaacgctgtgataagtatatgcccgttcttgataaaggggctacaactgatcacatattgattccaaatgggcatgatcaaatgcctttacaaaagaatattacagatgttatggaacaacttcatcatatatatccagataaacatttctttttaagcagttatgataatttgtttaaagagttagagaagaaagataattatgatacattacatggcgaattgctagatggaaagtatatgcgtgttcatcgttccatcttctcatcaagaagcgatattaaaacaatgaatacaatgatagaaaataaacttacaaatattttagaaccactagcaagtcttgcatacactttgggatttgattattatcatggagttattgagtcaatttggaaagaaatgatgaaaaatcatgctcatgattcaatgggatgctgttgtagtgataaagttcatcaagaaattgtcaatcgatttatgattgcaaatgaaaaaattgatcgtttgatagatttctataaacgtaaaataacagatgctatggattgtcatatttcattagataaattaacagtctttaatcttctgacatatcaacgtaaagaagtcatagaagcacaaattacaacaagaatgaaatcttttaaattggttgataaagataaacaaatcattccttttgaaattgttcatcaagaaataattgatcctggaattattgatcgacaaattgtacattatggaaattatgatccatttgtaagatatacaattcattttaaagattcaattcctgctatgggatataaaacatattttattttagaagatgagattcaaaaagaaatatcgatgcaagattgttcattatttgaaaatgaattttataagataagttttcatgataatgggacaatagatatttatgataaaaaacgagattgtttatatcaagaagtccttttattagaagatggtagtgatgatggtgatggttatgattattctccaataaaagatgattatattattagatctcatcatgtaaaagcaaatattgaaattcagcaaaaaggtatgaaaaaagttgctcaaatttcatatgatatgtctttaccaaaagatttaaattctcgaaaagaaaaaatttgtgatggtcaaattcatgtatgttttgaaattgaattaaaagatggaagctcttatattgggattaaagctcatattcaaaataatgtgaaagatcatcgcttacgtgttatgataccattacaaattcaagggaaaatgagtattagtgatttccaatttggaatgattaaaagacctgtttatgatttagcaatggatgtttgggaaaaagaaagatggtcagaaagacctgattcaatctattcaatgttatcatatgttactattgaaggtagtcatatggcagcaattacgaattctataagggaatatgaaattgttggtaaaaattatgagactttagctttgactttatatcgatcagttgggtatttagggaaagaagacttagtccgtcgtcctgggagaccttctggtattaaacttccaactcctgattctcagcttcttaaagaaatgacttttgaattcgcattaacatcatattcaaatgataaagatttatctatcttggctaaagaatatttaacaccacttgtatcttataataagatgccatataacgctatgaaattaaatgatgttgatttctttacaccatatgaatattcattatttgagcaagaaagtcatttaactttaagtaccctaaaaaaagcagaaaatgaagataggcttgttttgcgtgtctttaatacttgcgaagaaaatcaatctttaaagttaaatattccactagaaaatactattaatttaaatgaagaacatataacatttgataatataattttgtacaatcaagttaaatcatttcttattaaaaaatgaccaaaattgttatagcatgtgattcatttaaagaaagtatgactgctcaagaagcatgccttgctatagaaagaggaataaagacagttgacagttctgttgattgtcttttgattcctatggctgatggtggagaagggacaacagaagttttaatgcaatcattaaatgcaatgatatgtaatgttattgttaagaatccttttggcaagaagatttgtgctacttatggaatgaataaagatggtgtggcagttatggaagttgctgcttcttgtggtattgatttaatcccaagggaaaaaagggatccaactcaagctctaagttatggattaggtgagatgttaaaagatgctttatttaaaggcgcaaagaaaatcatcattggtttaggtggaagtggtacaaatgatggtggttatgggatgttgtgtgctttaggagcaaagttttatgattgtcatcattgtttattaccaattgagattgattctatttccaaaattcacgaaattgacttatcttcagtttataagttattggggaattgtcaattgattgtagctaatgatgttgaaaatgtgtttactggaccaactggggcaacatttgtttttgggaaacaaaaaggcgcaagtggtgaacaacttcagtatttagaagaatcattagttcattttcaaaaagtcatacaaaaacagtatgatattgatctggctcaaattaaaaagtcaggatccgcaggtggactaggtggtgcattatatttacttggtgctcaaatgatgagtgggattgatttgattctagaagtaacacaatttgaaaagcatatacaaaatgctgattatattatgacaggtgaagggagtattgattcacaaactgttcatgggaaaacaatttcaggaattgctaaaattgctttgaaatatagcattccagtgattgcttttggtggtagagttacagaggatgctcagaatttgtatgatattggtgttacagcattattttctattacaaatgaagtgaaaacattatctaaagcattggtggatggtaagaaatatcttgaaataactgctaataatatatatagattattagagtctaaataaaatctccatatggagatttttttcgatatatatatatcgaaaatttaccaagtgcatttttcctgattttaaaaaaatattgataaaatcaatggttttataattttttggagtgtttttatttttttaatattacttggtaaaaatgacttaaatatattgatatatatagatgtttgaattattataattaatgtaggtgttatattctctaggattaatagcaacacatgatgtattgaaacagaagaaatgagcagtgcatctttgcagttaacacgattaatagcaacacatgatgtattgaaacgtatgttggagatttgaatgatgatgctcaaaatttgattaatagcaacacatgatgtattgaaacttaccatactgcttacgaagttgaacagcgagccagattaatagcaacacatgatgtattgaaacgacatgttgtattgtgaacaaattttaaatggaatgattaatagcaacacatgatgtattgaaacaagatatgcaatgttagtgattatgctaggaaaaaggattaatagcaacacatgatgtattgaaactcaaagtcgaagtctttaccctcttttgctaatcttgattaatagcaacacatgatgtattgaaacgcatcattatcaaacggaaagaccttattttcgcacgattaatagcaacacatgatgtattgaaactcagagctatcatcaatcgaatctctatcaattattgattaatagcaacacatgatgtattgaaacaaaaggagaatataataaagaaaataaaacaattgagattaatagcaacacatgatgtattgaaacgtataagtacgatattgttatatatggtgaaagcaagattaatagcaacacatgatgtattgaaactaggtaatcatgtacaagcaaagacaattgcaaaaggattaatagcaacacatgatgtattgaaacggtttaaaaccagttgcctgcgcctgatagaactccgattaatagcaacacatgatgtattgaaacttgaaaataaagcctagaggaattgagtatcttgaagattaatagcaacacatgatgtattgaaactcatacgtcttgtaaaggcaagcatatgctttgggattaatagcaacacatgatgtattgaaacaacagtgactaagaatgttatcctagaaacaaacatgattaatagcaacacatgatgtattgaaacgtatcatattgccacccataatttgttttgtatttgattaatagcaacacatgatgtattgaaacgaaagaaattgaagctgaattattagctaaatagccgattaatagcaacacatgatgtattgaaactccctcgaaatgctttaggacagtattatttagattgattaatagcaacacatgatgtattgaaacagtgaatggtttgattatgcattatgctcaaatatggattaatagcaacacatgatgtattgaaaccagcgtaattcctcgatttcataagtatcataaaggattaataacaacacatgatgttctgaaatctcgatatttcaagtttgttgccaaacaggtcatatgttaaacagcaacacatgatgtattgaaacgatgttgttgaagaggaaagacaaagaaagaatatcgattaataacaacacatgatgtattacacaattgcttttatatgattactattttctaactaaaataaatataggaatgccaaactgcaactcagttacttatttaagtaactgggttttcttttatagattaatccattatatatgtttataatgcaagtagggagtgagataaaagatgagaataaaagataatgaagatctgttaattttacaaatagaatttgaaacatatgaagaaaaagaaaaagtcttaacattaatcaatacaatgaatacaaaaattattggctataaaagagataaaaaatattttgtacaaatagaatctatctattatatagaattagtcgataaaaaaacattcatctatacaaaagaagaatgctatgaatcaccattatggctctatcaaatagaagaacaattagatcaacaatttatccgtgtcaataaatcaacaatattaaacatgaaatatatcaaaagtttaaaagcagatattggctcaagaattatcgtctatttagacaatcaagatcaagttcttgtatcaagaacttatgctaaagaatttaagaaaagattaggaggagaatagaatggaacaattaatagaaattatgattaatattatcaaaaaatcagcactgccatttattgtttctacaatgttacttataataataggaagttttattggaaaagatatgtctacaatatctacattatgtactcctcaaggaatcccttttacaagtttatttcaattaatgggattaagtatcattataggaattattaatactatctttgatttatcaaatactttaaaaaaaataagactcatctatcaaatcattatacgtgtttttctcatcattatcattattgtcatttttgtgagtctatttgattggtttccattttatgatattcatgcatgggctggattttttatctcatttggtttatgttttggtatatcaatgttgttaagtttatattttacgcataaaaaagatcgagaatatgaacagttattagaaaaatacaaagaaagaaggcaataaaatgaatgctattgaagtgaggggaatttctcaatcatttttgcaaaaagaagttttaaacaatatatcttttgaaattcaaaagggagagatttttggtttgttagggccttctggggcaggaaaaacaacgcttatcaatattattataggacaaataaaacctaataatggaaagacttttgtattaggaaagaattcgttagaactatcaagaaaggattatacacagctaggtttagtgctagaccaactcggattatatgaaagattaagttgtatggataaccttcaactctatgcttcactttatcaattagagaaaagtaaaattgaagaagcattgaaatatgttcaactttttgatgatagaaaaaagacagtcaatgaattatcgaaaggtatgaaacaaagattaattattgcacgagcaattatgcatcatcctcaagttctttttttagatgaaccaacatccggattggatccagcgacaactttaaaaattcatgaacttttattagaactcaagaaacaaggaacagctattttccttacaacccacaatatggaagaagcatcatcattatgtgatcgagtagctttgttaaatgaaggacatattattgaatgtgatacaccagctgctatatgctcacgttataatcaacttaacacagttacgattacaaccaaagatcatcatcaatatacaattcaaaataacaaagaaaacgcaaaagttctttttgaggaaatgcaggctgaaaatattttgtctattcattcttctgaaccaactttaggcagtgtctttatttcacttacaggaagggagttgatttaggtgagttatcatgttataaaagcaatatttataaaacaatataaagataccttaaaaaatattagtattcttattcaacttataatgtttccagcaattagtattgtgatgacatcctccattcaagtatcagaaattcctagtcaatattttgtgattctctttgcaacaatgtatgtagggatgacaccaattatcatgatttctaatattatgggagaagaaaaggaaaaaggaagcttaaaaatgttaatgatgtctaatgtcaaaccaactgaatatattttaggagtgagtttgtttgtcatggtaggttgtctcattggtttatttgtgatggcaatggtaggaggctatcgtggaatagaattaataacctttgtaggcatttgtagcttgggtatgttgacatctgtttttttaggcagtgtgattggtattgttgctaaagatcaaattgcatctaactctttatctgtaccggctatgcttatttgttcatttgtacccatgctttcgatgtttaacgaaaatattcgtcattatggaggcttcatttatacacaacaaattaatgaacttttaacgcatagtccaatcacttcattttcattacaaccttttgttattatatttttaaatatgatggtattacttggaatctatatctatgttttccaaaaaagaaaactgtaaaataaaaacgaattgtttatcgagcaattcgtttaatcaaataaagtaaaacctaaataataaacaagttcatgaaacatctttgtattaaaaccataacaaatacaatcatccatttctccatcccaatcattattgagctgatcaagtaaaggttggacttcttcttttgtgatatcacaagtgatataaaattcactatgatcttttaatccagcatattcacgacttggagaaattgaaaaatttggattgatatctaataataagtctttaatcatttgaatttctttatcatcttcactagaaacaataacatgtaatcttgcaaacattcaaaacacctctttcatttttaacattgtaacatagtcaataagaaaataaaattctctttcatgagaaaaaatataaatttttctttaatctaataatttttttgtgtacgtaattgccaaataatgctaaaataggcgtgtattcatgtaaggagtgataaagaatgattaaaattggaattgttggttatggaaatcttggacgtggcgtagaatgcgctgtcacaaatagtccagatatggaattagcaggggtttttacgagaagaaaacctgaaacagtgaagactcatacaaatgttcctgtatatgaaatggataaactttatgaaatgcaaggacaaattgatgtattggttttatgtggtggaagtgcaaatgatttaccaacacaaactgttgaactcgcacaatattttaatgttgttgatagttttgatacacatgcaaagattcctgaacattttagtaatgtgaatgcttcaagtgaaaaaggaaaacacattagtattatttcagtgggatgggatccaggtttattttcattaaatcgtttatatggacaagctattttaccaaatggtcaagattatactttctgggggaaaggtgtaagtcaaggacattctgatgcgattagaagaattgcaggagttaaagatgcaagacaatatacaattcctgttgaagctgcattagaaagtgttcgtaaaggagaaaatccaactttatcaacaagacaaaaacatacacgtgaatgttttgttgttgcaaaagaagatgcagatttaaaaagaattgaagaagaaatcaaaacaatgccaaattactttgccgattatgatacaacagttcatttcattagtgaagaagaattaatgagagatcatcaaggaattcctcatggtggagtcgttttaagaagtggtgtgacaggtttcaatcaagaaaataaacatgtgattgaatataaattaactttagattcaaatccagaattcacatcaagtgttttggttgcttatgcaagagcggcataccgtttagctcaagatggacaatgtggatgtaaaactgttttcgatattccaccagcatatttacatgtggaatcaggagaagaattacgtaagaagttattataaaactcgcttagctgcgagttttttgtcggaaccggctatgaaaaaataaaaatagatgaaattgtgaaaaaagcaaggagatatgacgaaaaaacttgtcgtaaggctagaaattatattataatagcactgtattatgaatatgaaagtcaggaaggtagatattatggatagaaaagtaggaactatttcaagaggtattcgttgcccaatcattagagaaggtgatgatttagcaaaaatcgttgttgatagtgtaacagaagcagcatatagtgaagggttcatgttaagagatagagatgttatttcaattactgaatctatcgttgcaagagcacaaggaaattatgcttccattcaagatattgctgatgatgtgaaagctaaattaggtggggaaacaatcggggttattttcccaattatgtcacgtaaccgttttgcaatctgtttaaaaggaattgcaatgggagcaaagaaagttgttttaatgttaagttatccaagtgatgaagttggaaatgctttattaacatatgatcaattagatgaagcaggaatcaatccatatagtgatattttaacattagaaaaatatcgtgaattatttggtgataataaacacgaatttacaggtgttgactatgttcaatattattcagatattattactgaagctggagctgaagttgaaattatttttggaaatcatgctcaagaaatcttaaaatatacagattgtgttttaacatgtgatattcatacacgtgccagaacaaaacgtttattaaaagctgctggcgcaaaagttgtttgtggcttagatgatatcttaacagcaccagtaaatggaagtggatataatgcaaaatatggtttattaggatcaaataaatcaacagaagatatgattaaattattcccaagagaatgccaagatttagtagaaaatattcaaaaagaaatcttagaattaactgataaacatgtagaagttatggtttatggagatggagcttttaaagatcctcaagggaaaatctgggaattagctgatccagttgtttctccagcttttacaagtggacttgttggaactccaaatgagttgaaattaaaatatttagctgataatgattttaaagatttaagtggtaaggaattaagagatgcaattgcgaaaagcattaaagaaaaagatgataatttagtaggaaatatggcatctcaaggaacaactcctcgtcaattgactgacttgattggatctttatgtgatttaacaagtggttcaggggataaaggaacacctattgtattggttcaaggatattttgataatttcacagattaaggagaagaagaatgaaacaagatatgatcgtaattttagatttaggaagtcatcataatacaaatatagctcgttgtattagagatttaggtgtttatagtgaaattaaagctcatgatattactgtagaagaattaaaacaattacctaatgtcaaagggattgttttaagtggtggtcctaacaatatcatagatggtaaagaaattgatattgctagtgaaatctataatgctggttatccaattatttcttttgaacataagttagctcaagttgataatagaacttatccagctaatgaagaagaattaaaagatattttatctgactttgtttttaatgattgtcatgctcaaaagaattggaatatgaaaaactttattaatgatcaagtggaaatcattagaaaacaagttggagataaaaaagttttattagctttatctggtggagttgattcatcagttgttgctgctttattaattaaagcaattggtaatcaattaacttgtgttcatgtgaatcatggattaatgcgtaaaggtgaatctgaaaatgttgttgaagttttcaaaaatcaattacatgctaatttggtatatgtagatgcaagtgaacgtttcttaaataaattagcaggtgttgatgatccagaacaaaaacgtaagattattggttctgaatttattcgtgtttttgaagaagaagcaagaaaacttgatggtattgaattcttagctcaaggaactatctatcctgatattattgaatcaggaactaagactgcaaaaatggttaaatctcatcataatgttgggggattacctgatgatttacaatttgaattggtagaaccattatatcaattatttaaagatgaagttcgtgcttgtggtgttgaacttggtttaccatatgaaatggtttatagacaaccattcccaggtccaggacttggtgtacgttgtttaggagcaatcacaaaagaacgtttagaagctgttagagaatcagatgccattctacgtgaagaatttgcaaaagctggtttagataaaaaagtttggcaatatttcacaattgtacctgatttcaaatcagttggtgttaaaaataatgctcgtagttttgattatccagtcatcattcgtgcagtgaatactgttgatgcaatgagtgcaactattgaacaaattgattgggcaatcttaacaaagattactgatcgtattttagctgaagttgataatgtcaatcgtgtatgttacgacttatcacctaagccatgtgcaactattgaatgggaataagaaaatgggctaaaggtaatctagaataacgtgtgctctccaattattggggagtctagattatcgtggggcaagtaacatcccaaataattgaataagctataaaggtggatactccagttttaggattaccactttttatctaaaaagcgccttgaaattggcgcttttgcatattttttgttagttgattttatatttctgtaaacataaataaaagattaaaactatgtggtgtaattgtagcaagacaaaattgttaagatacgaagatgaagatttctatatttatttagttttctatcacaacattttaaaagggtatggttctcgtaaaaatttaggcttaatcgattttagattgcttacctgtaaaattgcatcatcagtcttgcctttagaaacatcaatgccaacaaataatttgtaatgtttttccatgagaaatacctctttttaatatgttttttgctttgaattgcacctctaaatcaagacaaacgcaatctcgtaaatacggagacaagcatagatacttgctgcaacaaactaatttgggtataaagtacgtcatgattaaaaggattaagtctatagtaggcggacgtcatgcagccgcaaggaagaagagtaaaaccttcattcaaaacgttactattatcttaaaattagacaatgcaatcaagaattattagtcagtaatctactctttgattacactacatattatacgagctacttgttataaaataaaattaaaggaacctctaaattaagttataattagtttgaagacaaatttaacttaaggagattccatatatgaattataaccaattagaaaagataaagcaattaacagatcaaacattaattattggaacagatgtttcaaagaattttcatgtttctagagcacaggattttagaggtattgaatttggaaaatcaatcaagttcaacaatgatattattggtattcttgaatttgaaaaatggttcaagcaattaatggaaggtaatggtaaaacagaagttgtgattggtatggaaccaactggacactactggataccattagcgagatgtttaaagaatatgggctataaggttgtaacagtcaatccggcagctactaaaaaggctaaggaactagatgacaacaatcagtcaaaaacagaccatagggacgcaagagttattgcacaattagttaaagatggcagatatacagagccaaatcttttggatggtttttatgaagaattaagagaaacaactaagaggaggattagcatcatattttgcacttcaaattgctacggctttagttggttcattttttgtaggatttcatggagcagcgttaacaagggcaagtttagctatgcttggtggaggatcactaggggcagttggattaggaatgacaggagaaactgcttttattgcaggaggtggagcaattttggggctcgaattaactacaacaattagcagtgaatcttatgtgttgctttcagatagcaattctactatgaatgaatgtgcaaaattattaacgtttgttgagtatgctttattagataaacttcatgaaattgatgttgctaaaaaacttttatctcaaatggatattgctattaattacattggaaaaatgattgatgaacttccaaataatttaaaagatagaaagaaaatagagaagaatcaaaaaagaatttatcttactttgttaaatcaaaggttatattaaaaaaacaaattgaaaaagcagaaaagtgaggcatttaacatgggaaagaaaaagaaacaaaaagcaaaaaagaagcagattgttgctaaagccaatcttcaggaattgcaggaatcaagagatgggggtcaaattgcattgaggggctactcttatcaattcctgtattcttgtaatttgattttatcttctgacactgatacagtttttactctcgagggaattgaagatatcgatgctataaaatacagtgatgacagtaaaacaattacacacattcagctaaaatactccactcaacggcaagatgccagctttatggatagtgtgctgcaaaactaccttgaggcatacctaatcgataagaataggcattttaaattggtgtatgatttttctatcgcagcaggaaatttaagtaaactattttcgggaaatcttgataaaaactcaaaagaattttggaagactaaaattgataacataaaaaagaaaacttctttgtggaattggagtaattttgatttcgaagattttatacaacgattatctttcaaaaatgttaaaaaggactctctcgagaaaagcattgagaattcattgataaagaactttgagattgaaacagacaatatttctttatttactaatggtattaaattattgtgtgttgacaaaatggaaagccgtgctgaaataacacaaagcgaaataactcattgcatagaaacaataaaattcgatataagtaaggggcctcaaaatccagcccatgcttggattcaaagacttcaattttctaaatctgatgaatattcttcagattactatgaaggtaagaaagccactccttctgacattgcaaacaatttaccagtgatacgtccaattgtcgaaaaggaaatcattgattccataaataaaaacacaatcactattatcaaaacatctagcggtcaaggtaaaaccacgcttgcattaagagtaatatcattattaatcgaagaatatacaccctatcaaattataagatgtaataatgatgcagagttaggaaatatcgttgagtattttcgtatgcgtacacgaataggtgaaaaaccgcttattttacttgataatcttgatggtcatttaagcgagtggaatttattagctcaactcatgcaaacaagtgtaacataccattataaattcctcgttacttctcgcgaaaacgactggtacaattatggcggtgacataagtaatcttcattatttgcacattgttaagcctatcctaagcgaaaaagaagctgagaacatatataacgttcttaaaaaagaggaaaaacttcatgaaaatattaccgattggaaaaaagcgtggtcaaagattgcgaatcgtcagcttcttattgagtatgtgtatcttttgactcatggcgagatgattaccgaacgaatttccgcacaaatgaaggagattgggaacgcatcgacaggaggcatcaaatttgaaattttaagaaaagtttgttttgctgatgtctgcggtattaaacttgaaactaattctctaattagcgatttaatcgctaaaaccgacttagatatcggtgaaatatttaaaagcttggctgatgaatttttggtacatgttagttcagagggtgactatatcgaggggttacatcccgtacgatcgcagcatattattaatcgattacatgaatattttcctcttgataaaacagccctttcaatcgcaaagattgcctctgcttcagatatatcgattttgttttcacattatccagagttcgattttgacaaggatagattttatgctaatattgttagtatgtggatatgtgaatctgacttatcacgtttcgttcaagcaattcgcggtaccttttcgggaagtgtaatgcagtatttccaaaatcatagggcattttttgatgatgcgtacgaacatggcggattaatatttgtagcaacagatatttgcccctttacaaaacttaaagattataaacatgaattgaatatgcttgaaaaaatgtccgaaatgatgccggataatgctaatgtacagcacatgattaaactacgtgattcaattccaaaattcagaacttcaaaaactgacatctattgcttaagttccgctctgtatttaaaattaaaagaaattgattttatgcacatcagagatttagaatcatatgcagttattgtagattggctttacaatattgattcttcaatgaatttatcaacaaaaatcattttgaacgatctatgggccaatgctgaaaaacactctatcaaaactatatcatcattaatgtattcatcttattgtggaaatgaagatgagtacagcgagtttgtaaaaaataatctttttagaatcattagctatctcagacgtaaaaccaactctcacaagattcaagtaagcgacgataataaagaaataaaagtcgagtatttacttagagcgagtgaacttacaaaaggcaataacgaaagtgtttcaaggctgaatgatatatgtcgtacacttcccatctttgaaacgtattgttcagatgcaattaaaccacaaattgatttattggcaacttaccaaatgcctgacaatgcgcacaaagaaatgccccgaaggaacataattatatctttccatcaagagtttaatgctctgtggttgaaaactatagaaagcaattatgagtttgacacagtatatgcatggatagatcattggttagatgttcgtaaatgtgcatgtgatttgttggctgcaagctccaaatgtttacacaaattattgggtaaacggagtcttggtgatgctgctaattcgtttgacagtttgcatcaacaatataacaaaatgatgattgcgcatttagcatatccgcatgaacatcgtccgtttgagaaaaaaacaaaaattccagaacaatttaataaggctaaaataaattactttgatagtattcaaaattttgccaaccaatttgtaagttttgttaaacatgaggaacaggcgaagcgtttatcaatttacaatttaaaaaatgcatttgcagcattaactaacattcaaaaattctttgatgatattacatttgataatgagtatcgaaggaagcatatagaactatgtgcttatgaagaaaaggtcatctttgagacgtatatgtgttgtgaatactatttatctcatatgcctgataccaggtacaataaatatcaggtcaaagtttggttttcatcatcccagaaagcaaaaatagacgaggtcaatagcgtgatgacagatttaacgctctcatacaatgccgttctacctaaaagcttgtatcgtgacaatacatttatatgctatccaatattgctaagaaattttgatccaggaaatgatgaaatgatgaatgatttcttaattaccaccataccatttgcagaatctccgtatgattatttgcttttattgatgacaaacgatactggtgaagttattccaaatgcaatcaagttcccaaaaaaagcattcaaatatctttacaatgttataaacttagggtatgaagaagaaatggaccctttagctactccatatcctttcgaggtaactcaacaactgctagaatgttttgatggtgagtatatgcttcaagaaaaacaaccaaaaaacattgagcttagttttattgctgatatcggtgaagaattgtggatgtattcgaaaaatcgtgagtttcttgtcgaagaggaagacaaacagtatcttttcgataacctcaatgaaataaaagaacgtattgatggaatgataaaaggcatacagacaactgcaagtgatgatatattatcggtggtgaatgaattgtgctctgctgtttatcacggagattcgtttgatgatgaaaaatacaacaaattgatttcctatgttcaaacagcaagttcatgattatatgcatacaatgttgaattatttacatttatctgccgtaatataattactcattgaggagtacgaatatttacattactaatcaataatcatcttaaactcatcattaaatcagtcaaccagagaatagcgcgatgtatcgctactataaatgagtttgaaataagttttcaagtaagatgtaagtcgtatgctattatttttataaattatggactagccttgaaatgtactaattttaagtttaataatgcaatatgaactattatgtaacaaaatagtattatctttgatgtccgactctactaaacgtttcaaaacaagaatgaatcctagtaaaaatactagttaagatactcagtaatgctataggatacgttattctaaaagtattagaaaattttcactagtacagaattggaataagaaaacggactaaaaagcgccttaaaatgggtgctttttgcatatcttttgctggctgattttatacttctctaaacataaataaaagactaaaactatgtggtgtaattgtagaaagcactgaattttacttgcaaaagttcacttgctaggaataaatccctaaaacccaacagaaaggcacaaatgaaaatgaattatcctattttgaaagaaaaaaattggaatatttgaaacaaaaagaaatttgattttatttcaatttattagcaaataatgaattttttcatatttatataatttgaaaaaactacaaatactatatgataagttagatattgaatttaaatcgaaatggaatgtgaatgaaaaattaaaagaagagaatcaaatgaagcgggttcaattgatgaataataaaaataacattgtaaaaaaatcattttagatgaatgtatttataaatagtaattatttgtttagagttgttattcattgtaatttgtgagaaaattctataaaatattaagtacgagaggtgatacgaaatgaatcaattaagtacagatagttctgttgaatcatttgaaaatttatatgattctattaaagaagttttaaataaatctagacaacaagcatatcaagcagttaattcatcaatgttacttgcttattggtcaattggtaaaattattgtggaaaatgaacaagatggtcaatttagaggtgaatatggtaaatacacactttctgatttatctttgaagctatcaactgaatttggtaaaggatttacagttagaaatttacaacaaatgaaaagttttatactttatatccaattgcgaacacactgtgtacgcaattgacttggtcacattatcgcttccttttacgagttaaaaatgaaaaagcaagacaatggtatatcgaagaagctgttaaggaacattggtcgagtaggcaattagatcatcaaatttcaacaatgtattatgaaagattattatctagtcaagataaaaatgaagttgttgcggaagcaaatcataaattaaaagatatcattccagaacaatttattaaggatccatatgtactagaatttattgatttaaaagattatcctgctcttcgtgagagcgttcttgaacaagcattgattgataatttacaaagtttcttactagagcttgaacgtggtttctgctttgtagcaaggcaaaaattgttaagatacgaagatgaagatttctatattgatttagttttctatcacagtattttaaaatgttatgttctaattgatttgaaaattggaaaactaattcatggtgatgttggtcaaatggatagctatatttgtatgtttgatgacttatataaaaacgatgataataatcctacaattggtttattattatgctctgaaaagaatgaggcaatagctaagtattcagtattacatgatgaaaaacaaatggttgcatctaaatatgttttaacattaccaaccgcagaacaattagaaaaacaaattgaaactgaaagacatagaattgaggttgaagctgaaattaaaaaaaagattaatgaggagtagttttttcttacagagatgtatttctattgaccaaagacgaatttttttcatttttggtcaatagcgttcgatatatgttaaaacatgatatcaaagaatgtgttttctgctaccgttttgatactattaactcatatactcaaaataaatgaatctaaaacatagtaaaaacaactaaatagtatgtgatgtgtgaacaaatatttttaatattaaatggtagtatttgaatggaaataaaatgatagatgttagaaggtgactatttaacggcactttttgcatatttaaaaggtcgaaagtacggatttagttactcaaaattgttttatattaataacaagaaaataaacgagtgttatgctttaagataagattaaatttagtacaacaagctacatatcatttgattcaaagcggtgtaagatttatttatacaattgtagatattcgttagaatatcaaaagtattaatacttattatgtatcaagctatataggaatttttgctgaagtagagcaatagagtaaaaaagttagtctaaacgcattagaatttactggaaaagaaaaacaattatatagtttttggtaaatcttatcgaaggatttgattaaattaatgagaataaccaactatttataggtcaatgcaataagtggttttattaaatatggtatatattgtggaaaggaattattatatgataaagattaattaaaaaataatcatgcaacttatttttcatacaaaaaaataatacatctttaacaataaaataagaatacagaatattaaatagctttagtgacttttctaatcattaaagctataataattttatataaataaaagaaggttgatgagtaaacatggaaaattttaatggttttttattaagacaagaacgaataaagaaaaattattcacaagaaggaatttgtagaggaatatgtacaccctcttatttgtgtaagattgaacaaggtaaagcgactccaagtcaagatattttggttaaactctttaataaattagatattcaatactgtactgatcaagaattactatttgaagcaaaaaagtattttgaaatgtttttctctatgattgaggtagaagaagatataaatgaaagtcggtgtttttttgattctcatcacaaagaattagaaacaagtgaattacatatcgaatatcatttatatttattctatacttatataaatgagagtccaatacaggctcaaaaagaaaaatcatatttagaaaaaatagtttcatatatgaatgaaaatttgaaagcttacttttactatttttgtgcaatcttgattggtaagaatagagcagcaatttcttatttaaaaaaagcaattcaattgtttcctactagttattactattattatcttggaacaatacaatttcatattggtgattatgaggagtgtgttgtaaattctgaaaaagcatatcgattagcttcagaagatggtaatccttatgttttaataagctctagttttttattaggatcatgtcattgtttttatcataatcaacatagtgcaaaattattttatgaacgatcaattggtttaacaaggggatataaaacaaaggtaaaggattatgcctattataatcttgcaacaagctatctagaagtagaaaattataaagaagcattatactattttaataaagtagaatatttagatgaagatgtatttcatatgtttatctattatcaaaaattagcttatctatatttaaaaatgaataataaagttaaagctgaaaagaaaatatatgaaatgaaaaagatgattgataaattagataagaatgttgatttatatcagactattttagaaaatttggaagcgatgatggaagaaaattatttaaataatatcaaatatgaaaatacattaaaatatctttatgataatgttgaagatattttagggtatggattaaaaagattttatgcaattcaatcaatagaattacttaaaacacaaagaagatataaagaagctttaaaaattagtgaaacgatgaaaatttcctaaacaattataaaatatgctatttaatactgtattttatatcataatttcccatatacactatcttttattactttaagcagtttgctaaaataaagatagaaaggagggaaatatatgcagctatggaatatgaattttattattataacaataggaacgtttataagtatcacaggtggaactgctatgtcattggcgttaagtattttaatatttgatcaaacgtcttcaacatggttaagtgcaatttatacagtgatctctttattaccaaatttggctctgccttttcttattgcaccatttgtggatcatagtaatcctaaaaaattaattgttggtttagacttcttttctgggtttttatatttaatatttttattttatgtggtacaagaagggtttcattattatgcatatttaatgtttagcgtcataatcaattgtgtggatacagtatatgatttatcttatcagtgtctataccctgatttaataccaaatgaaatgaaacaaaaaggttatgccgtatcagctatggtggaaccattagcaactgctataattgcaccgatgattactgttttttatatattttggggtattgaaattgtctttcttatagaaggaatatccttaatttgtgcttctattttagagtcatttattgaatatgaaaagaaaataagacaaaaaaaagatttttcactttttgtacacttaaaaaagtataaattagaattgtttgaaggattgcattatttaaaaaaagaaagaggaatattgaatatatgttcttatgctgctattcataatgcaacatcaaaaggaagaaacttaatgatgatagcatattttcaaacgtcaccgattctttctacaacaatgtattcatttttagtatcggcggaaacagttggacgttttgtaggtggtatatttaattatttaaaatgttttgatagaaagaagaggtatcacattactataaaattatattccttcatagagttgtttgatggtataacactttttatggcatatcccattatgattcttttaagatttatttgtggatttttaggtgtaagtagtagtaccttaaaagaagtagcaatacagaattattttgatagcgatataagagcaagagtatatggactaaataatattgctattacgataggaatattgcttgtacaactgtgtgttggtgcattaggtgaagttttatcctattctcatgtagtcttaggattatctatacttaaattcttttgtatgtttagaagtttagtgaaaaataaaagtgaagtagaaaaagtttatttatataaaagagaggtaataaaaaatggttgataaattaaaaaaatgggaaaaggatgggtatgtattaagattagcaacacttaatgatgcagaagaatactataaaaataactttaatcctttagatccagaaacagcgagattaacagggtgtaaacctagttttacacgtgatgaagttgttaatttctttaaaaaatgtatcagtgatccagacagatatgattttatcattatttcacctgataatcatatcatcggagaaagtgttcttaatgaaattgacgaagatttaagatgtgcaaattttagaattggattattccacaatactgggtatggaaagggaataggttcttgggcaattgaaaaaacattagaatttgcttttgaagaacttaggttacatagagttgaattagatgtcttttcgtttaatactcgtgcaatacatacttatgaaaaaatgggatttagacatgaaggtgtattaagagatgcaataaagacgaatgatggttatgcagatgatgttttaatggcaatattagaggatgagtggagaaatatctatcataacaattgtaatgaatagttgaattaaacggtattgatacagtttatgttgaaaaagtgatacaattctaatatgttgacctcaaggttaaccacaattattttgtgtcgaatagaataagagaaaattaatttttagtatctattgatgcagataatctcaatgattatctgtgttttcttattatttatgaataaaagaactatttttgcattcaatgaattttataacaattatttagccatataattacatgtatttttatttgttcttgtgataaaatatcttgtatgaaataaccaaataaatgatttaaattttacaatgcttcaaataatatataactatcctggatttaaaactcctgttatccatagtaaattattaatagataatccagctatgatactaaatcaaattagaattgcaattaaaataaaaatatcaagctatattaagtatagaggttcaagaaagacaggagatatgactttaaaaatgagataaatttttaattatattatatgtttttaaagcaattactttgataagtgttgatggagaagatatagaagctcaattaaaaataatatattccgttttttatgaaaattaaagttctctttgatttatataaaagattgattaatacattataatggtttattagaaagatggtttaaaaacaataattagtattgattcatttgatttttgaaaggcggtgaagcaataatgcgtttgattcgagataataactcggtgcagttttaaaatctggtaacaggttgcatcgaggctataattcatgttatcaggtaactgcacctatcgtaaaacaattaaaacgaaaaggagtagttataaaatgaataaagaacaattactaaatgaatggttaaaagaagaaaaagtcgcccatataaaaggttgggatttttcacatcttcaagatagatatgtcgaagaagatcaacttccttgggatttttatgccgttataaaaaaatatcttacaagcgatatgcagttattagatatggaaactggtggtggagaatttttattaagtttaaatcatcctaaaaatatgacatctgctattgagggatacaaaccaaatgttgtttattgtagaaaagtattgcttccgcttggaattgattttaaagaagctgatggtgaagaagttttaccatttccaaatcaaaagtttgatattattacaaatagacatggaaattataatgtatctgaattaaggcgaatactaaaaaataatggtttgtttttaacacaacaagttggtgctgaaaatgatcgagaacttgtagaattattgttgtctaagaacatagaacttccatttccaaatcaatacctcaaaataaaagaaaaagaattaagagacaatcattttgaaatcattgaaagtggtgaagtttttcaaccaataaaattttatgatgttggagcattagtttggtttgcaagaattattgaatgggaatttgtcggcttttcagtagagtcttgtttagaaaatttgtataatgctcaaaaaattcttgaagaaaaaggagttattgaaggaaaaattcacagattttacattgttgcaagaaaaaaagattaaatctttatagcttttgaaactatgtaagtcatataattaatgtgttactttcttaaataagcgttaagtaactttagagggtgtctttactggagacactttcttttttgtctatatgatattgattgaatgtagagatcataattgatagaatatttaaaaagctacaaatatgtttatgtcttagatagaaagagagtagatgagtataatgaagaagattgcagtattaatatatccttatttttctttacaggaaataaccatccttacatcttgcttaacactttggtatggagaaaaaattgatgtattaggaagtgaaatgaaactatatgaaagtgaagatggctttttcattatgcctacaaaaacattaaatgatgcatctgtattggattataaatgtgttattctaccaggaattatcaatcctttaccagcattatatgatgagaaaataataacatttttgaaacaagcaaaggatacaaatgtattaattgtagcaatttctgctgcaccactcttactagcaaaagcaggtcttttagatgatgttaaatttacagctggttttttcatgcaaatgatagatgtgttcccatttattcatcgtgaaaactttgttcatcaaccacttgttgaagaaaaacgaataattacagcaattggatttgcatttagagagtttgctatggcagttcttaaaagacttggatatgatgttcaaggcaaatttatgtggcccgtagagaaaacatattcagaagaagaacttactttttattggaatgattctgattatcaagaatttcttaaagagctagaagcatataagaaagattaaaatgtttttaattttggagttaaaaggagaattgaaaaaatgtggttttataaaaatgataaaactagtccagtattgactagtacagaacaagcaaaatcagaacatggagaaaaaatatatgtgcttcctcaaaccgcaattttattgtatatgagtggacttgattatattaaggaaaaatatgatgtacaattaattactgatcgttttccaagatttttgaatgcttgtccaatttataaaataaaaggtcaaaatgatatttgtttcttggatgggggacgtggtgcgccaatggctgctgatactattgaggttcttaaagttatgggagtgaaaaatataatttctgttggtttgataggtggctttgttgaaaatattaatataggggatatagttataccaaataaagcatatgtagaagaaggaacatcattacattattatgagacaatcgaatatagtaccccaaatttgaagctatttaataaaataattgaatatattccaaaacatatagttgctccaattatttcaactgatgcaatctatagacaaacattttataaagaagcgttatggagaaaaaaaggttgtgttggagtagatatggaaacatctgctttgatgagtattggtaagtatcttgatttgcaagttgtctccattttaatggtctctgataaacatccaatttcaaaagaaaatgaaacttgggaatggaaaatgacaaaagatttgagaaaacaattattatatcaagttatagaatttgcattatcattataagtttatattaatgataaattttgcaccatatataaataaaaaataagagagttaaggaaaagcgtttcagttataaaaatctctctttttttgttggtaaaaagagaggatatattatatcataatagatagaataaagaaggaggataaagatggactggttagaacaattcaatcatgcaatgacatatattgaacaacatttgactgatactattgattatcaacaactagctaacatcgcaggttgtccttattatcaatttcaaaaaatctttacatatatgacaaatatctcattaaacgaatatatacgaagaagaaagatgtcacttgcagctgtagatttaatgaatcatcatatgcgagttatagatgtcgcttataaatatggttatgattctccaacagcatttaaccgggcttttcaaagtgttcatggaattgctccttcaataatcaaaaaaacttgtccgtctattcaagcttatccaccttttactttttcattatctattcaaggaagtgtccctttacaatttcaaattgttgaaaaagaatcatttcggattgttggtatgaattgtcctttgagtcatcaattagaaaacaattttaaagacattcctcatcaatggaatcaagcagtccaaaatggcacaattacacaattaataacatttatggatagtgaacctaaaggattattaggtgtcagcattcaccattctagtgattggaaatatatgattgccgtaagttcacaaaaagaaagtcaagattttaatgaatacatcattcctagtgcaacatgggcaatttttaaaggacatgggcatacaaagacaattcaagacttagaaaaaagagtgattttagaatggttaccaacttcaggatatgaatatgcaaatattccagatattgaagtttatatcaatcctaatcctgaaaacgctatttatgagtattggttaccagttattcaaaaggaggaataaatatggcttattcaaatataaaagtatcattatcagcagatattcaagatgtctgggagtttgttacaaatttaaatcagcaactttggcgtcgtgatgttgcgtctattgaaattcttgacgaaaagacatttatagaacatacacctgaaggctatcaaacaagatttacgattacagttaaagatccatttcaacgttatgagtttgatatggaaaacacaaatatgaaaggacattgggtaggtgtatttgcatatcatgatggaataacaacccttgattttacagaaaacgttgatgctaagaaaatctttatgaaaccttttgtgaaaggctatttaaaaaagcaacaaaccaattatatcaatgacttaaaaaatattttaagtcaaacaaacaaaatgaaagaacaataaaagttctttttcattttctgaaatttccactgtatcttgttttatttacgttataatatgagtaaataagattcgtcaatgcttgacgaaagataaaaggatggtagagaagatgagtgtcaaaataattgcagtagatatggatggaacgtttttaacaagtgataacacgtatgatcaagaaagatttatgaaacaatatgaatatatgaaagacaatgatattcattttgttgtagcaagtggtaatcaatattatcaattgcgttctttcttcccagaaattcaacaagaattaactttcattgctgaaaatggggcttatattgttgataagggagaagatgtttttgttgcaaaattagaggaagaagatatccaaacagttttaaaagcaatcaacaaatatcctgaagttcaaaaagttgtttgtggacaaaaaagtgcttatataagcgaccaagtagatgaagattattatcaacatatgaatttctattatcatcgtttaaagaaagttagtcattttgattctttcgatgatacaatttttaaagtctttttacattgtaatgaggataactttgaaacaatcctaacagaattaaaagctgaaattggacatattatgacaccagttgattgtggtcattttgggatagacttaatcattccaggtatcaataaagcacacggtattcaatttctaaaagaaagatggcaaatcaaagatggagaaacaatggcctttggtgatagtggtaacgatcaagaaatgttagaagaagctgaatatagttttgccatggcaaatgctaaagaatctgtaaaagaagtttctaattatgtgattgattctaacaatgatcaagctgtgttagacgctattgactggatgattcttaaagaaaaaatgttccaagaataatcaaggagtcatatctttatgatatgattttttgttataaaaagaattttattataaaaattgtcataataatgcaaatttttgtttatatgttcacacaattcgtgtataataaaaatcacatttattaaatgggggattgattgtgaaagagaaaagaggacaatggaatagtcgtttaggttttatattagctgctgctggatcggcagttggtttgggaaatatttggaagttccctgggaaagttggagccaatggaggtggagcttttcttctcacatatatgattgttgtggcaattattggttttactgttatgatggcagaatttgcgattggaagaaagacacataaaaatgctgtaggggcatttgctatgttgaataaaaaatggaaatttgctggtgttataggaattgttgctttatttattatcttatcttattatgccgttgttggtggttgggttactaaatatgttattacttacttaacaggagcccagtttggtaatggaagtaatgcttatgcaacttattttactaattttatcacttcgccagttgaaccaatcttatgggatttattatttttaggtgtttgtattttcattatttctaagggtgtttctgcaggaattgaaaaagtaagtaaggttttaatgccaggtttatttgttttgttaattgggattgctattcgatcagtgacattccctggtgctgatgaaggattgcgtttcatgtttacattccgtttagaagatttgacttcggatatgattgtggcagctgttggtcaagcttttttctcactatcagttggtatgggaatcctcattacttatggttcttatttagacaaagaaactgatatggtcaatagtgcaaagtggatttgtattttagatacttttgtggctatacttgctgcactagccattattccaagtgtctttgtgactgttggaccagatggacttggaatgggtggaggctttgcttttgttgctttgccacatgtctttgaaacattaccaggaggaatcggtcatatttttggattggttttctttgttttgttattattggctgctttaacaagtgcattgagtattttagaaagcttagttgcttgtgtcagtgaagaatttcatatcagtcgtaaaaaaagtatggcaataatggttattcctttaactttactttcttgtggttattcattatcacaactttcaacacgaggaatcaacttgccttggtttgatttttctaatggttttcaaatgcttgcaatgaatgccgtcatggaaaaattaacagataatgttttaattcctttaggggctctggctttttgtatttttgttggttgggtatggaaaccaaaaaatgcaattgctgaaattgaactagaaggtgtgacatttcctttaaaaaaagcttggtcattttctattcgttacattgcttctattgcaattattgtgattttatactttaccgttgttaaaggtatcgtcttatcatagaaagtctcatgaaaatgagatttttttattatttaaggattttttaagaattgattatttataatgaagatgataagagaggggagaaagagttatgctttatcaaatattaaaaaaagatatgttaaaacgtaaaggggttaatataatcttgtttctttttattacattatcaacagtctttttagcgagtagtatcaacaacattacgattatttcttcagccgttgattattatatggattatgcccatgtacctgatgtcaatataattattgattcaaaaaaagataatacacaaattgatcattggttacaacagcaaaaagaaaaaaacgtcatcagtgattttgaatataatcaatttttagaagtatcagcaaagtctgtgagtgtcaaaagaggccaacaaaaagaaacgatagaaaatcaaggggctaatttgtatttatcaactatggatgttgattacagtaaagtttacgatgattttggaaacgttcctatcgtcaatcaaggcgaagttcttgtatctaaaacaatgctagaaacagcaaaattgcatattggagaaaaaataacaattcaaagtaaaggtgtttctaaagatttaacaatcaaagcagctgttaaagatgctgcatttggaaatgaaatggttgggataagtcgttttcttttaaatgaaaaagatttccaggattatcagcccgtaacttatgctttaggcgtttattatattatgacaccggatattgatgcttttactgagcttttaaatcatcaaggattcacacaaatcatcaatattatttcaatagacacatataaaatggtttatgcctttgatatgattgttgcaggattgttaattgctgtaggaatctgtttgatttgtattgccttattggttttacgctttactcttgttttttcaatcgaagaacaatatcaagaaataggaattttgaaagccattggattaaagaataggaatattaaaaaaatatatcttatcaaatattttgtgatagttgttgtgggggcagtgttaggaacattattaagtattccagtcagtcaagtgatgattcaaagtgtgagtcaaaatatgattatggcaagtgatgaacttaatttagcaattaatatcggttgtgcattatcaattattgccttagttattatgttttgttatttatcaacaagaaaactcaacaaagtttcagcaatcacagctattcgaggtggctatacaggtgaaagataccatagttatcggggatttcatttatctaaaatgaaatatttatcagtgtctaactatcttggatttaatgatatcacaacccatttaacacgttacattgttttgattattaccttttgtttaagttttattttaattacaattccattaaatacaattaatacaatgcacagtcaggaaatgttaaaaaagttttccattgatcctaatgcttcagttttattaaaaaatattgaagtctctcaaggtataaaatatcattttgtaactgatctgattgaaggaatgcaacgagtagaaaagaaaatggaggataaaggttatcaagtagatatgacaggtgaaccactttattttatcaattacaccgatcataagaaacaaaaaaataacaatcttatgactttacaattggttggtcatcctagagattttcttgattatgatgaaggatatgccccagaacttccaaatgaagttgccttttcaaaagatattatgacagaaaatcattggcaaattggtgattttgttacagcaaacattaatggaaaaaaacaaaatatgattatcagtggaacatttactgattacatgcaacttggaaaaagtgctaggctcaattcacaaattaactgtgatcaagaaacgatgtttgattattggagtatcatggttaatgtgcatagttcacaatcacaagaaaaacttatacaaacgttacaaaaagaatttcctgaatacaaatggcaaagtggacaagaacttgctgatgaaacaattggcggtattcaaacaagtttacaagaaatgattatcccgatgacaatcctattatgtggtgtcattatgcttattaccctattaatggaaaaattatttattacacgtgaaaaaggtgaaattgccatgttaaagagtattggttttcaacataagacaattcaaaaatggcagatgatgcgaatggcttttgttgttattgtagcaatgattgtatcaattcctttatcattattaagtaatacaataattcttaaaccaatatttgcaattatgggagctcaagtcaatattcaagtggatccattacaagcatatttaatttatcctggtattttattaataggaattatgatttcaacacttattgcaacacatagtgttaaaaatattaatattcgtgaaatgaataatttagaataggagaagaaagtggtatggagagtttaaaagtaactaatttatgtaaaacgtatattgtaaataaacgtcaaaataatgttttaagaaatgttaatttagaaattcaagctggagaaatggtcgcgattatgggaccatctggttcagggaaaacaactttgctttacacagtcagtggaatggatgatgcaactgcaggaaaagtgaatttctttggtaaagaattaacaatgttaaaaccaaatgaaatcagtgatttacgtttacaagagatgggatttgtctttcaacagatgtatatgctgaaaaatctgtctatttatgataatattatcttaccagcatatcaagcaaatcaaaaaaagaatcgtcatgatattcaagaatgtgcaaaaatcctaatgcaaaagctgggtattagtgatgtttctgataatggtgtcaatgaagtttcaggtggtcaattacaacgtgcttgtatttgtcgaagtttgattaatcagccaaagattatttttgctgatgaaccaacaggagctttaaataaacaaaattcaattgaagttatggatgaactgacacgaattaatgtggaaggaacaagtattatgttagtgacacatgatatgcgtgttgcaagtaaatgtgagcgagttctttatatcgaggatggaaatattcgtgatgagattattttaggtaaatgtatatcaacatcagatattcgtcaacgtgaaagacagttaaatgaatggttaattaaattggggtggtaatcatggcagatattttgctagttgaagataatcaagaattggctgaattgattcaaacatttttaagtaaagaaggctggacatgtcattatgttataaatggtgaagatgctttgtcatggctttttaaccatctaccaaaagtgattcttttggatattatgttaccaggcatggatggctttgctttttgtcagactgtccgtcaacatagccaaattccaattattatgatgagtgctaggtcaacaaagacagatcagttattaggctttgaattgggcgctgatgattatattgaaaaacccgtagatccggatattctttgtgcgaaacttcgcgctttgtttcaacgcatttcaagtcaacagaccaagcataatctattggtttcaaaagatatcacaattgatcaagaggcacataaagtttacttgaaaaatcaattattagatcttaatgtgaaggaatatgaattattagtcttattggttaaaaatgcaggaaaaacaatgcataaagattatttatttaatcaaatatggggtgttgacagtcaaagtgaaaatcaaacattgactgttcatattaagatgttaaggacacaaattgaagatgatccacgacatccaaaacgtattcaaacagtttggggagttggctaccgttatgaagaaatataaccgtatcatcattttatctatcatcatttatttaggtttggcatttctatcagggaatgcccttttggctagtcaaaatcaacaaagtcatgcttaccgagttgaaagccaacggattatcaatcaaattcaagatatctcacaagtagaaaaaatagacttaaaagattatcaatatgtgaaagctattgattatataaaatcaaatgttatcaatcaaaatcaattagattcattttatttagaatcaaaccttggtcaaacacaaatcttaccttattatcaaaacaatcaattacaaggttatttaaaattcacttatcaactcccaatatttgatattttacatgtctttttgattatgcaaatcagtttattcattttagaactctttattctgattatcttatggtatatgaaaaagcaattgattcaaccttttcaacaattaaatgacttacctattcatcttgcaaaaggtcattttaaaggtgaggttaaagaagcaaaaagtcaattctttggaaaattcatgtggagtatgagtcaattaaaagatgaattagaagtttctaaaaaaagacaattagaattaatgaaagagaaaaagactttgttattatctctttcacatgatatgaaaacaccattgaatcttattcaactttatagtaaagcttgtttaaatgatgtttatcaaacagattcacagcaaaaacatgcaattgaacaaattgaaatcaaatcaagagaaatagaaaaatacattgatgaaattattcattcagcacgtgttgatatcttagatttagaagttcatcaaggagaattttatttaaatgacttattacaaaatgttttttcaatctataacgaacaatgtgctctgcgtcaaattgaattgattgttcagtcttttgataataaattacttcgcggtgatttatcacgaagtcaggaggttttagagaatctgtttgaaaatgcattgaaatatggagatggtcgtcgaattgaaatcacttttgaggaagaagattattgtcaattgattcatatttttaatagtggagatactgtgagtgatagtgaactgaatcatctttttgaaagcttctatcgaggaggaaatagacaaggcaaaccaggtaatggactaggattatatatttgtcatgaattgatgatgaagatggaaggaatgatttatgctcaaaaaaagaaagatggaatgatgtttacgcttgtttttcaagaataaaaataaaaatcatgttataataaggataaataaaaaaaggagaaaaaatatatgtatacaatttcaaattttactcataatgatgacgttaaagtgatagaagaattaggaccatttcaagtcattgaatatcaaagagatttaagtgtaatgcctcatgatgcacaaaaggcttatttttgtgataagatgaatattcgtaaacgacaagttatatgtgatttaagtaaagcccatataacagttcagtctggtgctatgcaatggatggtaggaaatgtagcagcaacaacaggattaaaaggtgtaggcgattttttatcaaaagcagtaagaggaaaagtaactggtgaagatacaattaaaccagaatatacaggtgatggaacattagttttagaaccaacatataaacatattatattgcttgatttaaaagaatggaatggttctattgtattagatgatgggttgtttttagcttgtgattctaagcttaaacataaggcagtgatgcgttcaaatctatcatctgccattgcaggaaatgaaggattgtttaatttaggtattcaaggtgatggagttgtttgtcttgaatctgcttgtcctaaggaagaacttgtcgaaattactttaaaagatgatgttttaaagattgatggaaatatggctattgcatggagtggaagtcttgactttactgttgaacgttcaggcaaaacacttgcaggctcagctgtttcaggtgaaggattggttaatgtctatagaggaactgggaaggttttaatggcacctgttcaagaggatttaagtcctcttgaattaccagcaattaatgaataagatgataaaaatatacgctcgagcgtatatttttttcaaaattagaaatttgtttaaaaagtcaatttttatatttataatcatcaacaagaaatgtataatagataagtattgaaatgggagggcgatatcatgaaaaaagatatgacagtaggaagcccttggaagctcattttggcttttgggattcctttggttattgggaatatatttcaacagttctataatatggttgatagtattattgttggaaaatatgtaggaaaaacggctttagctgcggttggttcaacaggttcattgaactttatgattattggttttggaattgggatatgtagtggttttggaatacctattgcacaaagttttggtggaaagaaaatcaaacaaatgaaagaatatattattcattctttctatctttgtacaatgataacagtcattatgacgattgtgacagtattggctttaccaaccattttaacttggatgcaaaccccggctgatatttatgatcaagcgtatggatatattgtggtaatctttttaggattatttgcaaccatgatttataatatgttatcgagtattttaagagcaattggggattcaaaaacaccgctttattttttgattttatcatcagttattaatattcttttagatttattgttcattactcaatttcatatgggtgctccaggagcagcctatgcaacagtcattgctcaatttatttctggtatagcatgttttatttatatgaagaaaaaaacagatattttaacttttgaacatgatgaaaaaagatttcaaaaagcaatgtgtcaaaaactattacaaatgggattgccaatggcattacaattttccattacagcaattggcagtgtggtcattcagtccgctgtcaatagtttaggttctgatgttgttgcagctgttactgccgcaatgaaaatatcaattatgttaacacaaccactagaaacgttaggtttaacaatggcaacatatggtggtcaaaatttaggtgcaaatcaaattgaacgtatctttaaaggtgttcatgtgagttatatcattggtgccatttattgtgtgattgcctttatctttgtttatttcacatctgattacctttcgctgttatttattgatgccagtgaaacagtcattattagtgaaattaagcaatacttaattgccaattctatctgttattatattttaagtattttatttatcttacgtaatttattgcaaggtttaggttatagcttcttagcgatgtttggtggagttgctgaaatgattgccagatgtattgtggctttttgctttgttggaatgttaggctttgatgctatttgtattgccaatccattagcttggctttttgctgatgtagtttttgttgtaggatggctttataagagaaaagagttaaaacaaatgatttcatagatgagaggggatagttatggattcaagaaaattaggattaactgaggggacgatttggaaacaattgttattatttttctttcctattttaataggaacattttttcaacagttgtataatacagttgatactattatagttgggcaatatgttggaacttctgctttggcagctgttggttcaacaggaaacttaacaaacctaattgttaatttctttgttggtttatcttctggagcaacagtagttattgctcaattttatggtgctaatgagaaaaaacgtgtatctaaagctgtgcatacatcgattgcgatgtcacttgtctgtggtattttcatgacattgtttggactcgtttttgcttatcagtgtttacaaatgataggagtccctaatgatattattgatgcttcttcattatatatgcgtttatattttttaagtatgttaccaggcgttgtctataatattggagcaggtattttacgagccattggtgattcaaaaacaccactttattatcttgctgtttgttgttttgtaaatgttttatttgattatctttttgttgtttatttcaatagtggcattgcgggagctgccatcgcaactgtgattgctcaatttgtttgtgcaatattagtgagtatcaagttaatgcgtagtaaggattgttatcaattaagattaaaagaaattgcttttgattatcctatcttaaaacgtattattaaaataggaataccagcagggattcaatcaacaatgtattctgtttcaaatatagtcttacaaacaagaatcaatacttttggaacaaatacgattgcatcttgggctgtatatatcaaaattgatgctttatattggatgatttcaggagcttttggttcatcaatcacaacgtttgcaggacaaaattatggagcacatttctatcaacgggtaaaagatggacttaaaacatgtttaatgatgtctcttgtttcagcagcaattatcagtttattattatggaattttggcaatgcaatatgtcatattttctcaactgatccacagattattcaagaatgtaatcaaatcattcattttttaactccattctattttactttctgttgtgttgaaattatgtctgggatcatgcgtggctgtggagatgcctttaagccaatgttactggtatgttttggggtttgtgttttaagaattttatgggtaatgtttgtttctccattctttacatcatttaagatggttattatttcttatccaataacatggacagtgacgtcaattttatttatactatattatataaagttccattctcattatttaaaagattgaaggtgtaaagaatgaaaaaattagttgttggaatattggctcatgttgatgcaggaaaaacaactttatctgaaagcatgctctatctatctgggcgtatccgacaacttggacgtgttgatcatcagaatgcttttttagattatgatatgcaagaaagaaatcgcgggattacgattttttctaaacaggctattatcaattggaaagatgtagaaatcacacttattgatactcctggtcatgctgatttttcagccgaaatggaaagaactttacaaatcttagattatgctattgttgtgattaatggattagatggtgtccaaacccatagtgagaccatttggaatttactttcacattatcatattccaactttcttatttataaataaaatggatatcacgccttattctcaagaacatcttttgggcaatattcaatcccgtcttgatgaacattgttttgattttacaaatcaagatgaaaccttttttgaatcaattgcacttgttaatgatgatttattggatgaatatatggaacatcaaaccatccaaacacaatcattaattccgtatattcaacaaagaaaaatctttcctgtttattttggttcagctttaaaaactgatggtgtaacagcttttatggatgccttagatacctatacaaaagagccatgttatccagatgaatttggagcgcaagtgtataaagtgacacatgaaggtggacatcgcttgacacatgtaaaaattgttggtggttctttaaagacaaaagaaaaaatcaaagatgatgaaaaagttgatcaaatcagatgttattctggacataagtacgaaatgttagaaattgcaacgcctgggatggtcgttgctttaaaaggtcttagtagtattcaaccaggagaagggttaggttataaacaaacttcgctatccccactattatcttcttatatgaattatcgaattgttttaccagatgattgtgatcaacatcaaatgttaaaaaatcttcaacaattatcacaagaagatccaacattacatgtgacttaccatcaagaattagatgaaatccatatacaattaatgggtgaaattcaaattgaaatattgaaaaatatcatacaagaaagatttcatgttgatgtatcctttgatcaaggacaaattctttacaaagaaacgattttaaatcctgttgaaggtgttggacattttgaacctttacgtcattatgctgaagttcacttgttgttagaacctttagaagtgggaagtggtttacaatttgaaaccgattgttctgaggatgttttaagtcgttcttatcaacgtttaatcttaacgcatcttcaagaaaaagaacatttaggtgttttgacaggttccccaattaccgatatgaaaataacacttttgtgtggaaaagcacatcaaaagcatactgaaggtggggattttagagaagcaacttatcgtgctgtaagacaaggtttaaaaatggcacaatctattttactagaaccttattatcaatttcgattagaaattccttcaacttgtttaagtcgtgcgttatatgatattgagcaaatgcatggaacttttgaaatgccagatacatcatcagaaacaattattattgaaggagaagcaccagttgcttgtatgcaaaactaccatcaagaagtgattgcttatagtaagggaaaagggaagttatcatgttcacttaaaggatatcaaccttgtcataatcaagatgaagtgatagaaaaaataggatatgatagtgaaacagatatgcatcatccaacaggttctgttttttgtgctcatggggcaggtttttatgtgagttgggatcaagttcgtagctatatgcatattcaaagtggttggaaagaaaaaacaatatccattagtcaacaaacaacacgtacatatgccaatgaagacgaagaattagatgatatctttacccgcacctatggacctgtgcaacgtcgcttagccgatgattattatcgtaaagaacctgttcaagaatctatgcaagtcaaaatgaaaccagaatgtcttttaattgatggttataatgttattcatgcctgggatgaactcaaagatttagcaagtgtcaacctcggaagtgcaagggaacgtttgattgatattttaagtaattatcaaggttatcgtcaatgtttaatgattattgtttttgatgcttacaaggtcaaagataatcaaggcacattagaaaagaatcataatgtgtatgttgtttataccaaagaagcacaaacagctgatatgtatattgaacgggtaactcatcatttagccagtgattatcgtgtcattgtcgcaacatccgatgctttagaacaaactatcgtgataggtcgtggggctagacgaatgtcttcgcgtgagttaaaattagaagtagaggcactgggtcaagaaaaatttgatgaatttttaagaaaacaagaaaaaagtcgcaattttttattagaagatattcaaaaactaaaaacaaaggagtgatgcccaatggcaagaaaaatcattagagaggaatttgtaaaaatcattgaaaaccaaatcaataacgaattatctcccgcaactgttcaacattatcaaatactattagataaaggattaaatgaacaacgtgctaaagaatcattagcttatttctatgaagtttatcttcgacaaaatcctcgtcatagtgaagatttcaaagaagaaacatggttagattttttaaatcaagttcctgtgaaactccataatggtgaatacagttttgatcagtttgatgcaaaacaaaatgttagaaaaataaaaaaacgttttggttctataaaaaatgaaacaaaagtatttgaagctgagctttatgcgattgaaagttatttaatggtcttaaatgatgctttacaagtttctgggcgtgatgctcaaaaaatcattcatattgtgatgaatagattattagatattgaaaatcaagattcaacagattatagtgattttgcaggtgaagatttattatatatggctgatggattagaagaaatttgtaatccttatattaatgaagaattagaaaaagtattaaaaccttatgttaatattcatgaaccacaaaacttcgattatatttttaaaaatgtattcttatgtttaaataaggttttagatagtattgatttttgggataaggaatttggtaaagatggatattttcgctatattagacaatttatggatagtcatcgtattatggaagatggaccaattttattctttaatgaaaaaaccttacaaaaaaatattaaaaaatagtaaaaagcagttcacaaatcgaactgcttttttaccattatcttttatcttcacgaaatttctttctagaaggattcccttcaactctaaaaattgttttactttgacaacaatagataactgaccatactgtatcagcaccagtttttctatcatattgacacataaatccatattttccagataaaatatctctagcaagatcaatagaataatttgtatgtgtttttaatgtatgataagctgtttgatatcgttcctctgatttccaattatcaatattgaaattgttatagggatagagttttgaggcatgaaaatgattggttgtaacaacaaatgattcattgtgttgaggacgaatgatagccatttgttcaggattacactccacaacaacaacctctccatttctatcagcaattgttaatgtttgtgaagaagcaattgggagagacttgagtttatcaattgcttcttttgttgtttgacatttctctaataaatatctcacaatcataccggcattgaaccctggttttcttatcgttggatagataaaagttaaaccaatcgcaagtccatgttcattcataccatcttccatttctacaaatgctgtggtattaccttgaaaagcataaacatgctcaagagaataaagacaattcatatttgttttttctaattcaactaaaaagtcactgtttctagcaagaatggtttcttttccattatgaaatgcaaaacaagtacatttattttcaacttcaaaacaatacatactcaataaaaatgtatataaatcttcatgagtaagtttcaaaccatcagcaattccttttatttcttctaatatttctggataaaatttctgatatatgggcaaacatgcttgcataaaagcttctctttttgaagtttgaaaaagggctattttattttccagtaataattgtttttgataaagtttttgaccaaagttataacctgcttgataatgattgtttttaaatcttacatgatacatcattatatcttcctcctttttgtgtgagtcagatcttcctcaaataaaacgttaacaggataaaaattttatgtcaatgaaataaaattgtttataagactatattttattcttcaataaaaatttgtgatataataatatcaataaataatgaaagaaggctttattatgaggtatgctttaattcacgccaatgtatggattggctatgatactgatgaaattttagaaaatcaaacggttttcattaacaatgaagtaattgaaaagattgttcccgatggtgcaagtattccatcagattttcaagttgttgatttaaaaggacaatatttattaccaggtttgattaatcttcatgctcatttatttggaacaggaaaaccaagtaaaacacttggtggtggaggttctcaaaaggcattgatgaaatttgtgcattcaccattaggaaaaccggtgattgataaaatggtaaaggaacatgctttaacagcattacattctggagtaacaacaattcgtagttcaggagattttgtttattcagatgttagaattcgtgataagattaatcgagatgaaattttaggtccaagattacttgttccaggaccagcaatcacatgtgttggagggcatggtgatggcacttttgcagtaacgagcaatgatccaccaactttagccagttatgttgatgaaaattataatcatcatgttgactgtattaaaatttgtgtaaccggtggagttatggatgcgaaagtaaaaggggaacctggtgttgtcaaaatgaatcttgaacaagtacgtgctgtctgtcaaagagctcatgattatggttatcaagtcgcatctcataccgaaagttcccaaggtattcgtattgctttagagggtggtgttgataccattgaacatggaagtttcttagatgatgaacttattgcattatttaaagaaagacaatctgcgtttattgtcacgacatctccagctttaccattagccagattatctccagaaattacaaaactcaatgacttatgtgtttataattcagaagttgttttaaaaggcatgattgacggggcgaaaaaagctttggcaaatggtattcctgtaggacttggaactgatgaatcttgtcctcttgtaacagcttataatatgtggcgagaaatctattatttccataaattctatgatgtcagcaatgcttttgcccttcatacggcaactttaggtaatgctaaaattattggtttatctgaagaaattggaagtattgagataggcaaatgtgcagatttgattgttgttaaagagaatccattagaagatttaaaacgtttaaaagatattcaaatggttatggtaagaggtcatttgattgacaaaccaacatatcagaatttaccacaagttgatgaatggttggattcattattataggactttataagtccttttttcatttataaaaaagctaagaagattgtagaataaaaacgattatgttataatagtggcgctttgtaaaagcttaaaggaaataagtggaaaatgtttttttatttatgaaatggggattttttaagggaaattggaaatgatgaatattttgattacgggaaaacgccatattggcaaatcaacattacgacaacacatcatagaaacattacaattagactgtgttggttttcaaacgatacaaaatgaaaatgtaggaataggctggacatatcaatttgttgatatcaaaacgaaagaaagacaacctatttcattttatgatggtttaaaaattcaagggattcctgagactttttcaacattaggtgttcagtgtttaaaaaatgctctttatgcatctgaagattatgttcttatggatgaactgggaaggtttgaaagacataatcaggattttattgcttgtgtccatgatttattatctagttcaaagactgttttagcagtgattaaagatgagccaattccttatctcaatgagataaaaaaacgtacagattgttgtttatatgatctcaatacaatttcatttgaagaagcatttcaagccattatttttcaattacaaaaagaagggagaatgaaatgagtcaaagatttttcaaaaagatattatgttttattattactcttacaatggggatgtctttgataggatgtacatctacaaaacaagaaacatcatcagccatccaattaacagatcaagctggacgtcaagtgaatttaaaacaaccagcacaaaagattgtcagttgttattatattacaacttatgcaacattatctttaggaatcagtgatcgattggtaggaattgaaaagaaagcagagagtcgacctatttataaaatggcaaatgaaaagttattagacttaaaacaagtgggaagtttaaaagaattaaacattgaagccattgcaaatttaaaacctgatttggttttaatgccaatgaagttaaaagacaaagcacaagctttaacagatttacaaattcctgttttgattgttaatccagaaactcatgatcaattggttgagatgttgactttaatcggaaaagcaactggacaagaagaaaaagcaaaatcactcgtcaattattatcaaacacaaatggataaaatgaaacaattgtctgatgttcaaaagactatttatatgggtggaaactctagttatttagaaactgcaccagcttccatgtatcaaagttctttgattgaaacagcaggagggagcaatgctgctaaagatattcaaggtaactattggagtaaagtgtcttatgaaagtttgcttcatatgaatccagatatgattgtaatcccatcatctgctcattattcaaaaaaagatatcatgaatgataaacaattatcttcactaaaagctgtaaaaaataaggctatttatcaaatgccaaaaggtttagaagaatgggattcaccagttccttcaggaatcttaggaacaatgtggttaagtagtttattacatccaaatgattattcatttgatacatttgtgaaggatgttaaatctttttatcaaacattctatggctttgaaattgatgagagcctcataacaaaatgatgaaaacaaaacattatgtcatcattttatgctttcttttaataactctctttttattttcattaacaaaaggcagttttgctttatcaatttcagatatttttcatattttacttggtcaatcaacagattttatgaaatcacaagtcttttttaatctccgtttttctagagtcatgatggctgtgattgcaggattagctttaggtattgctggagcggtttatcaaatggttttttctaatcctttggcatcacctgatttaacgggtgtcgcaacaggttcaagtttgggagcagctttagcgattgttttaggagctgggactccttatgaaatgatgagtggagcttttgtgatggggatgttatcactagggtttgttttgttgttagttaaattaactggggttcaccgcactatgacttatctgcttgcggggattgttatttcatcagtgggggatgctttcatcatgttattgaagtatatggcagatcctttaggagaattagcagctatcgagttttggacaatgggaagtttagcttctatgacattggaaaaaatgatgatgtctttaatcggtgtgacgattcctatgttgttgattttgctttgtcatcgacaaatcactatgctttctttaggtgatgagaatgcaacttatttaggcctcaataccaaaacatttaaaatctttatttttatactaacgacttggatggtcgcttctgttgttgctttaacaggtgtgatttcctttgttggcttaattgctccacatattgcttatttattgttacataaacgcacgggagcgttctttatttgcagtggatttataggtgctattcttatattagtaggtgaccttttggcaagaagcctgatacctggaggcgaattaccattaagtatcttaactatctttttagcttcaccggttcttgttttctatatgtataaacaaagaggaaaattattatgagtgttttattaaaagtagaacatctttttgcgggttatcaagactatattgtgaaagatgtatctttgatattaaaagctggagaacttgttggaatattaggacgtaatggttgtggaaaatcaaccttattaaaaggaattatgggcaattgtccacttcaaaagggttatgttcaagtacaagaacgtaattgttttgaaatgaatataaaaaaacgtgctggttatttatcaatgctgacgcaacgcaacaatgtgattgagggattatcggtacgtgaaatgattgctttaggaaattatgcttcatcttctttttttagttttcaagatgataatcaaaccataacaacattagccaaagattatcatatcttctctttattagatcaagattatacaacattaagtgaaggtcaaaaacaattggttcaattatcccgtttagctatgcaaaatacacccgtatttttattagacgaacccgataatgccttggattttgataatcgtcattttgtctttcaaatgattcaaaattcaatcatgtctcaacaaaaagctggattggttgttattcatgatccactctttgctttaatgtattgtcatcgcattttattaatgagtgaaggaaagataattgatgaaattattccttcattacaaacaagcgatgaaatcactttaaaaatacagaatctttatccagatatcattatcaaaaaagatcaagatttacaacaatattattattttatgaaataagaaaggatatttatcaatgaaaaaaaatcaagaatatacatcgccatatgattttgaaggaaaacttcctttaaaacaagcgataccattagggttacaacatgttttagccatgtttgtaggaaatttaaccccaattttaattattacaagtgcttgtgcagcaatgagtgatgcaagtgaatttgctgccattcaagtttcattattacaaaatgcaatgctgattgctggaattgtcactttgattcaattgtttgcaattggtccagtcggtggaaaagttccaattattatgggaacaagttcaggatttattggtgttttccaaagtgttgctaaagtcatgggtggcggaattttaggttatggtgccattatgggagcttctattattggtggtttatttgaaggtgttttaggtttcttattaaaaccattacgtcgctttttcccagctgttgtgacaggaactgttgtcttatccattggactttcattaattggggtaggagttgcttcttttggtggaggaagtagtgcacaagattatggttcattagaaaatttatttgtagctttggtggttttaattattattttggttttaaaacatggaacacatggaatgatgagttcttcatgtattttaattggtattatttgtggttatatactttgtagtattatggcacttgttttaccaacaactggagtcaatggtgaaggtgttgaatttgtaaaatcatgggttattaattgggatgcagttgccaatgcgaaatggtttgcgattcctgagattttaccagtaacaccagtctttgatttacgtgccattttaccagttttaattatgtttattgttacagcggtagaaacagtcggagatatttctggtgttattgaaggtggaatggaccgtgaagcaactgatgaagaattatcaggtggtgttatttgtgatggtcttggttcaagtttagctgctgtctttggagttttacctaatacatcatttagtcaaaacgttggtttggttaccatgacaaaaatcgttaatcgctttgctttagcatgtggagctatattccttattttatgtggtttattccctaagttagcagcattaatttctattatgcctcaaagcgtattaggtggagctgctgttattatgttctcatcaattgtgataagtgggattcaattaattactaaagaaccattaaatgcacgtcgtatgacaattgtatcagtcgctttaggattaggttatggtcttggtgctaacagtgcagttttagctggtttacctgaagcagtgcaaatgatttttggtggttcaggaattgtcccagcagcattagttgcgattattttaaatatctgtttacctgaagaaaaatcaattgaaaaagtcaaatagaaaggcgggattgttttgttagatatcaaaaattatgtccgtgttcaaagtttacaagaagcctatgatttatgtcaaaatcgacgtaatgtgatcattggaggaatgctttggttgaaaatgcaaaatcgaagtgttgatactgctattgatttatgcgatttgggattaaatcagattgaagataagggagatgaaattcatattggagctatggttacgcttcgtcaattagaattagatcctttacttaatgaatatacccatcatgctttaaatgaaagtgtaaaacatattgttggtgtacaatttagaaaccttgcgacgattggtgggagcttatttgggcgttatggattttctgatgttttaacaatgtttttagctttagatgcgtatgttgaattgtatcatggcggaattgtttcaatccgtgaatttgttgagatgcgaccaagtttagatattttggttcgtattattgtgaaaaagacacctatgcaagttgtttatctttctcaaagaaatagccaaacagattttccagtattaacatgtgccatttcaaaaatgaatcaagattattattgtgttattggtgcacgtcctttaaaagcaactttactattggatgaaaaacatcttttagatagttctttaagtgatgaaagtatcttggcatttgctgatgatattgcacaaagagtaactttaggaagcaatttaaggggaagtgctgattatcgtcgtcatcttacaaaggttcttattaaaagagcgttatggcaattaagggaggaacacaatcatggaaattaaaatgaatttaaatggtaaagatattgtttcaactatagaacctgatactttattaattgattttttacgtcagcaaggttgtttaagtgtcaaacgtggttgtgatacaagcaattgtggtttatgtactgtgtttcaagatgatcaaccgattttatcatgtagtgttttagctgctagagctgctggacataaaattgtgacgctcgaaggaatgcaaaaagaagcacaaggatttgctgagttcatagctgatcaaggggctgaacaatgtggtttttgtaatccaggtatgatgatgaatgtgatggctttattaagagaaaatgatgatccaagtgatgaagatattttgaattatttagcaggaaatttatgtcgctgttcaggatatgaaggacaattacgaggaattaaaaattatattgcttatttaaaaagaagtggaaaggaggatttatcatgaaagaaaccctccaaaaagttaatcaacctgttcgtaaaaaagatgccatgaatcttttattaggaaagccagcatatgtagatgatataacaccacaaaattgtttggttgtgaaagttttacgttcgcctcatgcacatgcaataatcgaagatattgatgtgagtgatgctcaaaaagttgcagggattgaagctatttatacatatcatgatgttcctcaaaatcgttttacaatggcgggacaaacatatcccgaaccgagtccttatgaccgtttgattttagatcaacgcgttcgttttgttggtgatgcagttgcgattgtagctggggcagatgaaaaatcagttgatcaagcgatgaaattaattaaagttaaatatcaagttttagaagctgttttggattttcatcaagctaaagatcatccggttttagtccatccagaagataattggaaagcactgtgtcctgtcggagcagataatcaaagaaatctttgtgcgagtgaatataaccaagatggagatgttgatgctgtattggcaagttgtgatgaagtggttgaaagaacttatcatacgcgtgcgaatcaacaagccatgatggaaactttccgcacttattgtgaaattgatccttttggtcgtttacatgttattagttcaacacagattgttttccatgttcgtcgtattttagcacatgcattaaatatttcaaaatcattgattcatgttgaaaagccaagaattggtggtggttttggagcaaaacaaacagttgttgcagaaatttatccagcctttgtgacatggatgacaaaaaagccatcaaaaatgatttattcacgtacagaatgtcagattgctggatcaccacgtcatgaaatggaaatcactgtgaaagttggagcaatgaaagacggtacgattcgtgcgatagatgtttatacattatcgaatactggagcatttggtgaacatgggccaacaacagttggattatcaggtcataaatcaattcctttatataacaatcatttagaagctttccgctttgcttatgatgttgtttataccaatgttcaagctgctggggcttatcgtggatatggggcaacgcaaggaatctttgcggttgaatccgcagtaaatgaattagctgctcgtttaggtatcgatgctgtggcaattcgtgaaaaaaacatggttcaagaaggacaagtcatgagtgcttattataacgaaatgacaaagagttgtgcattaaatcgttgtatggaacatgctaaaaaattattcaattggcaagataaatcaaaagttcgtgtgatgccaaatggtaaagtgcgcgctgctggggtagcaatggcaatgcaaggttcaggaatttctggagttgatgttggttctgctactattaaattaaatgatgatggtttctatgcattatctattggtgctgctgatatgggaacaggttgtgatacgattttagcgcaaatggcagctgaatgtttagaatgtcaagtcgatgatatcattgtttttggtgctgatagtgatgcatcaccttatgattcgggttcttatgcttcaagtacaacttatgttacaggaaaagctgtagaaaaggcatgttgtcaattaaaagaaaatatatgtcagattgctgcacaaatgcttgaatgttcaaatgatgatgtagagtttgatggaaaagttgttacatgtttaagtaatcataaacaagtgacacttcatgatattgcgacacaatcaatgtgtggaaacacaatagcaacacaagttacagtgactcattcttcaccagtttcaccaccaccatttatggttggtatggttgaaattgagctagataaagaaaccggtcaagttgatattttagattatgttgcagttgttgattgtggaactgtggttaatccaaatttagctcgtgtgcaaacagaaggtggaattgttcaaggaattggtatggcactttatgaaaatgttcaatacaatgataagggagctattgctgaaaattcgtttatgcaatataaaattccaacccgtttagatattggaaaattaagagttgagtttgaaagtagttatgaagaaactggtccatttggagcaaaatcaattggtgaaattgttattaatacgccttctcctgccattgcacatgctatttataatgcaactggtgtttggttaagagatttaccaatgacaccagaaaaaatcgcgatgagtttgtgtgaagaatgaaaattcatatgatttatttagcagcgggaaatagccgtcgctttcaagataataaattgctctataactatcaagggcaaccgttatatcgttatggatttaatcaattgttaaaacttttatccaatgataattatactttagatgttgttacacaatatccagaaatcatatttgatataaagcaatttaattatcctcgacttcatgttattaagagtccaaaaagtcatttaggtatagcctattctattcaagctggaatcaaaaagtataatcaagataaagatgcttattttctttttctagtggctgatcaaccatatataaaagcatcaacaattcaaagacttattgatgaaacactttcacaaaaagctatgctttcaactttagcttaccaagaaaaagttgggaatccaactttgtttcattgtcaattttataatgaattgatgtctttaaaaaacgatgaaggtggtcgaaagattattaatcgttatcaaaatgcatgtttaaaagtgaaagttgaagatgaattggagttgctcgatattgatacaaaagaagatatagaaaaaagaagttctcactattgaatagtgtttgaacttctttttataatgctattgatttgaaacgaaaatatatgaatcatttatatataaaaaggatatggacccgcatcaatctgcacatccagctacaagaagccagaaatccatatccataaaaagtatatcttttttctactaaaaatataccactatttagaaataaagtcaattaaatcaatactttttcagtgtttttgtaaaaataaagatatgtattaaaaatagaacaagatttcattttatgaatgctcaagttcgataatatttgtttcaatcatttgataaaaatctttatttagatttgacttatataaacggatacaactacaaatattatcaataaactgtaatccctcctcagcaaatgattctttggaacatattgataaaacatgattatgtaaactgatttcagtaataattctattttcgaaatcacatttgttgaaactgtcaaaaataatatctacatcattttttataaagtgaacaattttatttaacattttaatgtattgtttttctttctctttttgattaaaaatattatcttttttacaatatgctgtataaataattttatgatctagttgttgtaattcctctaacatctttatcttaattctttgataatgtctatcaagaagaaccgctttaaattcataaaaaattctttgtttttctttgtcagatatcttcattgatcttagtttctttttaaaatgtttgtatgacagatttgtcgctgctttagaagaagttaacaatcctgcaactataaaatagtcatctgattcagtttcatcgatataaagtatcattcgtattcaccatcctgtggactcattatataataatttttcttttattcatacatgtttaatgctctttgttatatttgttataaaatataaaacatgtttatttcaagcatataagtggcagactgtttttaagatatgctagaatggcataaaggatgtgaaagaaatgttaatacaaaaacgcaatggtctttatcaagactatgatgcttataaaattaaatcagctatacaaaaagcttttcaaagtttacaagttcaaattgatgaaagacagttaaacgaattagtctatgatgttgaaaaacaagtttatgaaaagatgtcagtagaaaagatacaagatgttgtagaagaaactttaatgaaatatggatatcatcaagtggcaaaagcatatatcttatatcgtcaaaagcatagtgaaaatcgtgcagtgattcgggacttgatagaaatattgaatgataaggaattaatagaactttttgaaaacattcaaaaagattatccacaagatgaatattcattaaagtttcttttgattaaattgaaaactttttataaagacaatatgaatcaaaaagaagcttttcaaatgttaatcaaagcgagtgttgagttaattagtaaagatgcaccaaaatgggaaatgatatcagcccgttttttaaattatcaaattcataagacaataaaagaaaaaatgcaaaagttaaaaatatcttcattttatgaaaaaataaagtatttaacaaacgaagggtattatggtcgttatattttagaaaattatacaaaagcagatattgatgaattaagttcttatatcaaagaagaaagaaatgaattatttacatatagtggtttggaattggttatgaaacgatatcttattcaaaatcatgaacgtgaaattttagaaaaacctcaggaaatgtttatggggattgctatgcacttggctataccagaacaagagcgtgtcaaatgggcaaaggaaatctatgatattttaagtacattgaaggtgactatggcaactccaacaatgtctaatgcaagaaaaccatttcatcaaatgagttcttgttttattgatactgttgatgattctttagctggaatttataagagtatagataactttgcgaaggtttctaaacatggtggaggtatgggcttatattttggaaaagtacgtgccaatggcagcagtattcgtggctttaaaggagctgctggtggtgtcattcgctggataaaacttgtgaatgatacggcgacagctgtggatcaattaggtgttcgtcaaggggcagcagcggtttatttggatgcatggcataaggacttaccagaatttttacagctccgtaccaataatggagatgaccgtatgaaggcacatgatatttttcctggtgtttgttatccagacttattttggaaattggctaaaaacgatttagatgccccttggtatatgatgtgtccacatgaaattcatgaagtcaaaggttactttttagaggattgttatggggaagaatgggaaagaaagtattatgaatgtgttgatgatgagcgtatttctaagcgtgtgatgtcagtcaaagaaattgttcgtttgattatcaaatcattagttgaaacaggaacgccatttacttttcatcgtgatcatgtcaatgaaatgaatcctaatcctcatcaaggaatgatttattgtagtaatctttgtagtgagattgctcaaaatatgagtgctatggatattttaccttatgaagaagttcaagtagatggagaaacaattattgttgaaaaaacgaaaccaggtgattttgttgtttgtaatcttgcttcattaacattagggcatattgatgttagaaatgatgaagaattaagacatattattcaagttgttgtgagagcacttgataatgtgattgatttaaattattatccaattccttttgctaaagtcacaaatcaaaagtatcgtcctattggacttggtacaagtggatatcatcatatgttagtgaagcttggtatgtcttttgaaagtgaagaacatttacaatttgttgatgagctctatgaaaaaatcaattatatgactttagaagcttcatgtgacttagctcaagaaaaaggaagttatgcttattttcagggaagtgatttccaaaatggtcaatattttaaaaagcgtcattatactcatcaaaaatggcaagaacttcaatcaaagatagcaaacaatggattaagaaatggttatttattagcgattgctccaaccagttcaacatccattatcgctgggacaacagctgctgttgatcctattatgaaaaagtttttcttagaagaaaaaaagggaagcatgattacaagagtcgctcctgatttagatatgaaaacattttggctttataaaaatgcgcattatattgatcaaacttgggtgatcaaagctgctgctattcgtcaaagacatattgatcaatctcaatcagtcaatctctacataaccaatgaatttacttttagaaagttacttgatttatatatcttatcatggcaacttggaatgaaaacattatattatgtgagaagtcaatctttagaagttgatgaatgcgaatcatgcagtgcataggaggaaattatggaattaaaacaaaaagctttatttaatgcatctggtgatacagatgtgagaatgcgtagaatgattaatggaaatacaacaaatcttaatgattttaataatatgaaatatcaatgggtcagtgattggtatcgacaagccatgaataacttttggattccagaagaaattaacttaacccaggatatgaaagattatcgtttactaaaagatgaagaaagagttgcatatgataaaattctttcctttctggttttcttggattctctgcaaacagcgaatcttcctcatgtgggagaatatattacagctaatgaaattaatctgtgtttaacgattcaagcttttcaagaagctgtacattcacaaagctatagctatatgcttgattcaatatgttcaccagtaaaaagagatgaaatcttgtatcaatggaaatatgatgaacatcttttgaaaagaaatcaatttattggtgaacaatataatgcctttttagaaaatcgtgacagtttccatttgatgaaaacgattatggctaattatattttagaaggtatttatttctattctggtttcatgtttttctataatttaggaagaatgggaaaaatgcctggttctgctcaagaaattcgttatattaaccgtgatgaaaatacacatctttggttatttagaaatatgattttagaattacaaaaagaagaacctgatttatttacgccagataaaattgaagtttatcgttcgatgttaaaacgtggtgttgaagaagaaattgcttggggtcaatatgttttaggtgatcgtattgaaggcttaacaatgaacatggtcagtgattatattcattatcttggtaatttacgtgcaacttcattgcattttgaaccattatatgatggttatcgtgaagaacctgaatcaatgaaatgggtaagtctttatagcaacgctaatgacatcaaaacagacttttttgaagccaaatcaaccgcttatgccaaatcaagtgcgattgaagatgatttataaaaaatgccaattattgagatttctcaatagttggtctttttctatgatataaacaaaattcaagtaaagataaacctttatgttgatgagcaattgttgtgataaatgggacttgaagaaactgagccaatggataaagtggaatatctatttgttgaagataggcttgatccataaagtttaaacaaacaataatattttggaagtaggggtgaatatgggtaaagagttttaaatctcttttgaattgacaggcatgacaaacaataacaatctgatgacaatgaaatgaagatatcatttttgcgatgttaatgtaattatcgggtgtgacatgaaaagggatgaattgatcttggggatgaagtgaagataagtaatgaatgattgtttttttacctgtttgaggatatccaacaatcgcaataacttgacagtggtgttcatgaggattcaaggtaatcaccttgtgagagatacatagaaatcaacctttcaaattgattaaaaataagttgacaaacaacaaaaatgtttgtacactaaaacagtcttataaatggtagaggtgcaaaaagcatgagtacattatcacaatgtttggtgacagtgataatgaaaagggcaatttgccgaagtgtagtgatgacaccaatcatcattatgctgggtcattatagaatatataatggactgtcacgtcagtggagagctatctaagtgtgagtaactatgcgctttgattgatttccaatcaaagcttttcttttgccatttatagatagatgacaaaggaggattataatgaattttgtaggtacaatatgggcgatattgccagctatcattgcgattgtcattgcattgaaaacaaaggaagtgtatatttctttatttattgggatttttgctggggctttattgttaagtaatttccattttattaaagccacaacaactgtttttgaaacgatgatgacaaatttatctgatacttggaatattggtattttgatttttttggtatttctaggaacgattgttgctttaatgaccagagcaggagggagtcgtgcttatggaaaatgggctcatcaaaagattaagaataaaaaaggggccttactttcaacatttggattaggagtactgatttttgttgatgattatttcaactgtttaacagtaggaagtgtcatgcgtgaagtctgcgatgaatttaaaatatcacgtgcaaaactggcttatatcattgatagtacagctgcaccaatttgtatcattgcacctatatcgagttgggcagcagccgtcagtggctatacaagtggagatggttttacattgtttttacaaaccataccgtttaatctttatgccttattaacgattgttatggttttatgtgtaatttattttgaattggatataagtggtatgaaagatcatgaaatatcagcgagaaatggtgatgttcatcatggtagtgatgaatatcaaaaaggacaagagattgaatgctcagataaaggacaagtcatggatttgattttaccagttctctttttaatcatcagctgtattacttgtatggtttatactggaggcttttttgaaggtgtttcttttatcgaagcatttaccaattgtgatgcttcattaggtttggtattaggttcattctttacattgatttttacattttgtttgtatattcctagaaaaatcatatcttatagagaatatgctgagtgtattcctacaggttttaaaatgatggttccagctatgacaattctagctcttgcatggactttaggagatattgtttctactcacttacaagcaggtttatttgttgcaacatttttagaaaatacgcatatagcccttgctatattaccagcatgtttatttgtgattggtgctggattggcttttgcgacaggaacatcatggggaacttttggtatcttaattccaattgtcacagctatttttagtgaaggtgatatcatgttagtcattgcgatttcatctattttagctggagcagtttgtggtgatcatatttcacctatttctgatacaacaatcatggcttcggctggggcacagtgtcatcatattaatcatgtctcaacgcaacttccttatgcattaattgttggaatagcttgtgtgattggctatatcgtagcaggacttacgcaaaatgttattttgacattttttgcaggggtttgctctctattattgattgtattctttttgaaaagaaaatatgcttaacaaaaaaatcctatgacatattgccataggattttaaagtggaatttgattttgtaaaatatgttgctttaaatgttcatagagttcatgagttgcaatacaatctgctaaggctctatgctcattgttagataatccaagcaattccaccatatctgtcaatctatgatgaggcaagtggggataaacttttctagaaaattgtaaagtatccatatattcattttcaatatcttgaccaaaatgattagcaataaaacttaaatcaaaagctgtattatgaccaatgataatatcatctccaataaaattcaaaacttcatcaataatatcacgtaattcaggcattccaaaaaccatatcattatctatacctgttaattgtgtgataaaatgactaatgtctttatgtggatcaataagttgaacatattgatcaaaaatatgtccttgacgaactttgacaattcctatttcaataatttgatccctttgccaagataatcccgttgtttcaatatcgacaacacaataatcatcaacaatctttttcacatatcgaccacgtttacgtggttttctataacttgtttccatcttctcaacttctttcttcttctattaaataagatatatttcaaaaaatcaattgttttcattatttttccatatatttttgttattgtataggtaggagggatgaaattgaaaaagggaattatttttatgttacttatgatgttgttgatggctggatgttcaaatacgcataatgaaaaagcaacattaaaaagtgaacagacaatggttgatattaaagtgagtggtaaggttgttttatatgtttatgatttacttgatgattatcaacatgatcaagaatataagaatgttgttgtttctttttatcaaagtgaaccatttatgatgaaaataaaatcatctgtagcctcaaagcttagtaagaataaggcatatttatttgggttgaatggtgttgtttatgaagatgtacatgaaagtacaacaaaaatcattgaccatgaatgggttattcatactcatggttatgaattaaagttattacaagaagttagtgaaaatgaaatatttgctttagagagtgatcaattaaaaactgaagtcatacgttaaaagagtgaaaactcttttttcttttataaaatatatgaataaggtgagaataatgttataatgatgaacttgtaatggggggatgattatgaaatacatacatcaatttttaattattatgcttatttcttttataggtgagctacttaacattttattacctttaccgataccggcaagtgtatatgggttattgattcttttatttgggctatttacgaatatgattcaattacatcatattgaagatgtggctgattggttgattttaataatgccagttttatttgtgccatcagcagtgagtttaatgaatgttggggaagatttattagccaatgttttaattattggagttgtccttgttataagtactattgttgttatggtaacgactggaaaagttgcacaatatatgattgaaaggaaggaaaagaaacatggataaaatatttatagaaacaatgtattttgggattgtgttaagtttattgtcatattggatagctgtgcaaataagaaaaaagcttccttatccattgtttaatccacttttgatgagtgcaatcatttcaataactatcttaatgatatttgatattgattttgaaacatataatcaaggagctcaaatgattactttcttattaactccttcgacagtctgtttagcagtaccactttataaacaaagtcaaatcttgaagaaacattttactgcaattgttgtcagtctactggctggctgtttagctgggatgataagtattatttttttatgcatccttttaaaagcagatgacattttattattttctttacttcctaaatcaatcactaccgccatagcaattggggtttcaaatctaattgggggaaatgcgactatcacagttggtatggtaattattactggaatctttggtgctatgatagccaaaacaatttgtcgtctttttcatattacacatcctgtcgcaattggtttagcacttggcaatagtgcgcatgcaattggaactgcaaaggctattgaatttggagagattgaaggagcaatgagtagtttatcaattgtaatagcaggaatcctaacagttttaattgcccctgtacttgtaagctttctttaatgaatggaggaataacatgcttattattggaatctatatcattttatttctttttatgatatatacacgaaaccgtcaacattatgtcatttttaaagccttgaatagcttagcctttgttgggattgctatttatagtgcaatttcaaccaacaaaatggactttttaaatatactacttccaggattgataggttgtatgttaggtgatattattttggcaaccaagtttaaaaatcattttttatatggattgattgtttttttaatggctaatctttgtttttttaatcagtttttatcgtctacaatcattaagaatagaagaattgattcttccagcctttgcaatgataattttaatgagtctagcttatttaccacatatggattatggtcaattagaaaaaccagttatgatttattgttttatcattgcttgggtgatgtctaaaagcattatgctttatttattatttcaaacaaatatgtttttgataatcatgatagggtttattctttattttctttctgattttattttattgttttataaattttatgaatgtccatataaaaatatcttaggttttttgaatttattaacatattatacaggattgtttttaatcgcatatagtttaatattataaaaaagatttaaaagtactgattatatcaatacaattaaatctttttttctaatctaaacaatcatagaaagattttaaatgatcacatgatttttgaaattcctgcatttcttcatctgtcatatgcagttctacaatttctcttacaccacttttatcaataattgcaggaacactgatataaagctgatcttgaccatattgaccttgaagcaatgttgaaacaggaagaattttattttcattgtgcaaaatagttttgacaataccaactgtactagaagcaattccataacatgtattacctttacgattgaaaatttcccaaccagcctgaatagtatcctttttcatttcatcataaggattttcaccaatacgatctgcattatctttaacaacactataaatatctttacctccgattcgaacagttgaccaaggaatcatttcactatcaccatgttcgccaatgaccaaagcatgaacactacgaggatcaacctggattttttgagcaataaaatattttaaacgggctgtatcgagcgttgtaccactcccaataacttgatttgccggtaatcctgaaatcttataaacgtaatagctcataatatcaacaggattagaaacaataatgatatgtccatcaaaaccactacccatgatttgttgaacaatcgttttcatgacttttttagtaggttctaacatttttaaacgatcatttccagcatcatgaaccggaacacttgctgtaataataacaatattcgcatcgtgacaatcatcataagtccctaatttaattttggtattacgattcatatattcgatactttgagaaaggtccaaaacctcaccaaaagctttttcttgatttaaatcaattaaagcaatctcatcacacaaaccttgattgattaaacaaaaggctgtactaacacctacatttccagcaccaacaatcacaactttacttttttgtatattcatatatcatttctcctttgcagatattataccatgatttcattgattcaaatacatttatgcaaagaaaacatcatcgcattgatgatgttttctatattaacgataacattttttacatggttcataatgtcgtctttttgcttcagttattgaaacttgtcgtgggtttttcatgttgctgcaatttggattagaatgatatttcttaccagttttaggaatataaaccattgaacctgtttcattatgtgtttgtgttgttttggttgaagttgttgtattcgattttgtttttgaagaagtattggttgtgttttgcttttgttcacttgctttcttttgtttttcttcttcagcttttttagcggcttctttttgcttggcatcttcttcagcttttttagccgcttctttttgtttggcttcttcctcagctttttctttagcgagttgttcagctttttctttagcttcttcctctttttgtttctcaagagcagctaaagctttttgatcgacaacttgaatagttattgcattactttttatattattatctttatattgaagcgttacatcaccagatttttttagtgatttgataattaattgatgatccttaatatctttaatttcaacaatcccatcatgattcaattgaaaatcatcaattgataaatgagcatcttcaggtgaaaatgttaatgcaatttctttttcttcattcacatccatttttaaatgttttgaatcaatatgtattttatccaaactttcaccaccaaaaatcattcctataacaatcaaaacaataaaaccaattcctaagaatttcaaccctttaaaaatttttcttttcataaccatcctccctttctataattatataaaataatgtcaaattctgtaaatgattttcagattttttaaaaaagttaatattcatgtcacaatcaaagtggataatgatacactggatagtaaaggaagggaaataaaaaatggttaatcgtatacaagtcaatcgtaatattgttaatgttgaaattttaaaggaagtaaagaatcacttgattgctccttggcaaagaaacttattatttataacaagtgtcgttgctgtgggattaggaatttctaattttatgattcaaaaaactttacaaggagttgttttattgattttgggtattggatgttttgcggaaatctattatttaaatcatcgtaaatataaagaaacagtcaagacaatcaaagatcaattaaataaagaagaagtgacttatacaatgagttttggaaatgatggggtcgctattcataattgtgatactggtgtaaataataagattccttatgccaatataaaacaaatcattgaaacagaaaatacatatactttactggcaaaaaaacaagagtttattgttgttcgtaaagattgtttaaaagtaagtgttgaagattttgttcaattcttaaagtctaaagatacaaaaattaaaagatgggttaaatagcatattgcattaaggcaatatgtttttcttttgttcatgaacaaagaatgataaaataaaaatgaaggaaggaattaattatggaaataatcataacaaaaggggatataactgaaataaagtgtgatgcgattgtgaatgcagcaaataatagtttactaggcggtggtggtgttgatggcgccattcatcgtaaagctggaccagaattattgaaagaatgtcgtactttaggtggttgtgcaactggtgatgccaaaatcacgaaggcgtatcatttaccggctaagtatgtgattcatacagtggggccagtttatcgcgatggacatcatgatgaagcacagttattagagtcatgttatcaaaggtgtttagaaattgctgatgaatataattgtcatcatctggcatttccatctattagtacaggagcttatcgttatccgattttaacagcagcaaaaatagctgttttgacaattcaaagttatcaggaaaaatgtttaaataaggtagaaattgtatgttttgatgattatacatattcgatttataaaaaagtaatggaggaaaagaaatgagtggtttgggagttaatgaattaaaaaaacgattaaagagtatggagcaaaaagagttgatacagttgatttgtgatttgtataaaacaaataaatatgtaaaaatggatttggattcaaaattaaatgcagaaataagtaatccagttatgactagaaaatatattttacaaattcaaaaagcattagattatacaagaggacgttttgatatcaaaaaggctaaagaccaagttaaagaattttgtcaatgtaatcatgatttaaaaagtcaagcggatgtctatttagcatttattgaaagtgcggttgaattaactgttgaattgggtgatatcaatgaaagattttataatgatgttgtaaatacgacatggaaatatgttgaagttgtcaatcaattagatgaaaggatgattgcgtcttattatccaagattgcgtcatattttatatcaaattcaagatattggatggggatttgaagatgaaatgtatgatgcgttttataatattgatggtttttgtaatgaataaaaaaataaaggtgcatatcattagcctaatctaactaagcgtgttaaaatgatatcgaaattaaggaggaaagaaaatatgaaattatttaaatgtaatcattgtggaaatgttgtagaaaaaattgtggatagtggagtaggggttgtttgctgtggagaacctatggttgaattaacagctaatacaactgatgctgctttagaaaaacatgttccagttttatctattgatggagatatcttaactgctaaagttggtgaagttgctcatccaatgacaaaggaacacttaattacaacaattattgcggtattaggaaacaaagtcatgagagttgatttaacagatgctgatgaaccagttgctacatttgctttaggtggatataaaggaactgtagaagtttacgaatattgtaacctacatggattatggaaagctgaaattgaagcataataatatcggggatggctcgtctatccctttttatttggcatagaaaggatgaatgatttgaaaagtttaaaagcattgctagcaggtttgtttttagttggatgtaccaataattcaatccaatatcaaacaattgatgcgaaaaaagctaaagaaatgatggcgacgcaagatgttgtgattgttgatgtcagagaagaaagtgaatatcaggctggtcatattccaggggctttgttaattcctttatcaacaatcaatgctaaaaatcaacaattacctaagtctgatcaaacactattagtttattgtcggagtggtcatcgtagtcaaaaagctgctcaaaaatttgtcaagcttggctatgaacatgtttatgattttggtggtattcttgattggccttatgaaattgaaaaataatgtataaatgaaaaatcatcacccatactgaaaggggagatgataaaatgcatttttataaaaatcaaaacgatagtttttttgttcaattagatgaacaatctcaggatcatcctgaactcattcatatcttagttgaaaatcatgaaggtgatgaaatgaaacatcaaccaattgtttccaaagataaaaagacagtgaaagtcaagattggtgatattatgcatccaatgagtgctgaacatcatatttcaatgatttttttaaagacaaaacatggtggtcaatataaactcttgtcatatcaacaatcaccaattgttatttttgaattgagtgaagatgatgaaccgttagaagtttatggttattgtaatttacatggattatggaaagaagtcatttagaacatactttttcttgtatgttctttttaatatgttaaaatgttatcgggtgataaatatggaaaaaataacattaaaagaatttgatgaagtctatgctttgtttgaaaaagcatttattccagcagaattaagaccatatgaaaaaatgaaactgctttttttagaagatgagtttgtgatttatggtatgtatcaagatggcagaattattggcgctattattgtttgggagtttaatgattttgtttatttggaaaactttgcagttgatcaatctttacgtggacaaggattaggtagccaaattttacaggccgttaaagaactttatcctcatcaattacttgtcttagaagttgaagaaccaattgatgatttaaccaaaagacgagtggctttttatcaaagaaatcaatatgttttaaatccatatcattttgttcaaccaccattaagaaagaatgcaccaaaagtagaattgatgtatatgagttatccagattctataaatgtctatgcatttgatcaaattaaaaaacaaatatttagaattgtttatcaacaaggaatataaggagtattatgaaagcattagaagaaaagattaaaaaagaaggtattgtaaaaaaaggaaatgtattaaaagttgatagttttttaaatcatcagattgatgtctcattcttagataaaatgggagatgaatttcaacgtttatttcaagaacataaaatcaataagattttaacaattgaagcaagtggaattggaattgcggttatgaccgcaagacattttggagatgttccagttgtttttgctaaaaaatcaaaaacatcaaatatttcagatgatttatatcacacacgtgttgattcttatacacatcaaaaaacaaatgatgttgttgtttcaaaacaatatttaaatgaaaatgatcatattttaattattgatgatttcttagctaatggatgtgctattttaggactcattgatttagtaaaacaagcgggtggaacagttgaaggaattggaattgttattgaaaaaggatatcaagcaggtggtcgtaagattcgcgaggcaggatatcatttagaatcacttgccattattgatagtatggatgatgaatgtggacaaatcacttttaggcaggtctaagttatgttttgtcctcaatgtggaaaagaagtaaaagatggtgatctttattgttcatcatgtggttataaaatcaatcatcctaaacgaaattgtcccaattgtggaggggctatcgatgaaagtatgcgagtttgtccaacttgtgggtatcaaattcctcaaccaaagcaacaagtgtatgcgcctaaatcaaaactcgttgccgggctgttaggtatctttttaggaggtttagggattcataatttttatcttggttatagttctaaaggattcatccaaatttgtatgtttttaggtggatttttaacttttggcatctctacagctttagctgaaatatggggatttgttgaaggaattcttattttagttggctcaattgatcgtgatggaaatgatcagcgtttgtattaaaagaagcttagcttctttttttggaaaaaatattgattaaatcatgagaataatgtattgttatgtataacatatggagataaagggggagataagaagatgagtaaagttgttaaatttggtggatcatcactagctgatgccaatcaatttagaaaagtttatgagattatcaagagtgataatgaacgtcgttatgttgtaccaagtgcaccaggaaaacgctttaaagatgatatcaaggttactgatttattatataaggcttataatgcgcaatcagaaaaagaaatgactttaacttttaatgaaattaaagaaagatatcaaaacattattgatgatttacatcttgatatttcattagaagaagattttaaagttattgaaaaagcatttcaagagcaaattggtgaagattatgcagcaagccgtggggaatacttgaatggaaaagttttggcttgttatttagggtttgaatttattgatgcaaaagatgttatttttattgatagtcatgggaattatgatgcaaaaaagactgatgctattttacaagaacgattagcacaagttgagtatgctgttattccaggattttatggatctttaaatgatggcagcaataccattaaagcattttcaagaggtggttctgatgtaacaggagcgattgttgcgaagaatggaaaagttgacttatatgaaaactggactgatgtttctggtttcttgattgcagatccacgtattgttaaaaatcctgatgtaattgaaacaattacttataaagaattaagagagttatcttatatgggagcttctgttcttcatgaaaattcagttttcccagtgcgtagtgaaggaattcctattaatattaaaaatacaaataaaccagaagatccaggaacgctaattgtagaaagtacatgtcataaacctgctcatgtcattactggaattgctggaacaaaaggttttgcaacagtgatgattgaaaaagatatgatgaactctgaaattggttttggacgtaaagttttacaagtttttgaagaacatgatttatcatttgaacacatgccttcaggaattgatacaatgacaattattgttaatacagaagaatttattgataaagaacaagatatcttggctggtattcatcgtgttgttcaacctgattcaattattttagaatctgatttagcgttaattgccgttgttggacgtggtatgaaagcaagtcgaggaacagcagctagagttttcaatgcactcgcaagagagaatattaatattaagatgattgatcaagggtcaagtgagttaaatattattattggtgttcgtaattgttattttgaaccagctatcaaagctatttataaagaatttattgagaatgaataaaatcacctacgggtgatttttttgctataatgtaagtagaactgtttatatgtaagtcaatccaaaaacattttaaatgtgaaaaaaatcagtatacttaaagtaggaggtggaaagaatgggactaggactaattatttttggcttcttctgtttacattttcattatttagatgccagtgtctacagtgtagaattgtttcctttaagtttaggtctacttattattttacttggttttctttatgcttatcattatacacatcaaaaagcttatttagctttttcactgatgagttgtctgatgattgcattaacctttatcccgtatgttagatttatctatttattagggcaaaccattttatatggaagttatttgttatttgtaatcaaacaaaataaagattatggttatatcaaaaaattaaagttatggagtagtctttatttaatcagcgggttatgtaaagctttttgttatcaacaaaggctttaccagtttaacacggtggcatcactttttatcagtgtctttgtgattgcgacattgtggcatttatataaaataaaaaaacaaacacatcaagaaacaagacctcagctcacaagaaaacatattccttattatggttatttagtgattattggggtgagtatttcacttattgttattgcacattcttatttaatagactttgttgaaaataaaaattgttattttgaagcttatgaaattgttagtgataaagcaacagttcaatatgttgttgattatcaagcaccatatcttcatcaaagtgaggtcaatttaaaaaatcgacctactgtgattttaaaagatcatatcaaaccaaaaaaagcacaaatttatattggggataatattatttcacaaggatattttcatgaaattgatgataatctcacttatatggaagatgtattagaaagtcattttgctattcatttgtataatcattatcttccacaatgtcgaattgttttagatgatgtttcatatccggctaaacttcaaaaaatgaattatcaagaatatggttatgaagacgattttgtgaaaatcagtcgttgttatatgagtaaagattatattttgagttatccaagaatagaatggaaaaatcaaagtatcagacttcaatcactatcatttgttgataacaatgatcaagaaatagaaaaattagagtatatgaatgatcgtcattttaatgaggattatcatgattttcgtaccattgtttttgaaacttccgtatatacttcttatcaaaaatcaacgcgattgaaggtcgtttataaagaccaaaatcaacaaatcatagaaaaggaatatgtattagaaccttatgaaaattctagctcataatcaaaatatatccattttacaagaaaagtttcaaagatataatgatttggatgtagttttggttgaaagaggacttgattttcaaggggttgcttatgtttttgatatgcagcatttagaagaagtggaagcttatttacaatcgttagaaacatctgctttagttatttatggcaagaaaaatcaacggatttataagattgatgtttataagattatttatattgaaggtttttctaaggaagcttatattcatacaatggatgaacaatatgagattaaagagaaactttatgaattagaagaatgtttatttgattatgggtttgtgaggattagtaaatctttaattattaattgtcgaatgattgaatcattagaacctttattaaatatgaaatatcggatttatttaaagaatggcgagtatgtagaattaacacgtaattatattgcaagttttaaaaaatatttgaagatgaggtgatgaactaatgttggaaaaattaagtattcgttttgtaacaagtttgatttttatgtggtatatttttcaaatgactggcatagttatttatattgatgtctatatatttttaatgatgattcttttttcagtgttaatcactttattgattgaatcattatatagtttacttcgtcacttacttcgttggacgccttatttactattagggatgattgtaagtatatgtttgtttttccattttgctggtgggggaatttatttagggttacttgtttatacgttgatatctgttggtatacagttatatcgtgaatataaaatggaaaagctattaaatgttgcactggacaattggaataaaaatgatactattgaataaagaggaggtgtaaggatgaagatattgatgttagcaccattgcatgaagaagattttcaaaaaattgagaaagcttttcctaatgataccttgacttatagtacaagtgaaaatgttactcaggaaatgatagattggtgtgatattattgttgggaatccgaatggacatatagatttaaatcgacctcatattcaagctttattattacaaagtgcagggagtgaagcctttattaaaccaggacgtttagctccacaaatcaaacttgcaaatgctagtggaacctatggcaaagcgattgctgaacatatcataggaatgattttattgttaaataagaatttaaaacaatatactttacaaatgcaagagcatctttggaatcgattatcaactggcaaggaaatatatcatagtacagtggttattgttggattaggtgatatcggttatgaacttgctaaacgcttaaaagcttttgattgtcatattattggcgtgaaaaggagatcatgtgatttaccaccacatattgatgaaatttatacaactgaacatttagatgaagtcttacccaaagctgattatgttattttggcattaccacaaacaaaagaaaccattcatttgtttgatcaaaaaagattcatgttaatgaaaaaagatgctgtgcttattaatgtaggtaggggaagtgcaatcgtaagtgaagatttaaaaacagttttaaagaaaggtcatctctatggagttgggttagatgtctttgaagaagaaccactatctcaacaagatgaattatgggattttgataatgttattatcactccacatgtttctggtggttatgcttggaggagtgcccgtcattatttcacggatttagtcattagaaatattcatcatcttaatcaaaatgaacctttagaaaatgaagttgattttcaaactggttatcgaaaagtcattgattataaataaagatgtgaggctatacttttgtatagtctttttgcatatcatttgatttttataaaaaaatacttataatgataatatacccccctagggggggtgggaggttatgccatgaaagaaaaatatgatgttattggaatgagctgtagtgcttgtagtgcacatattgataaagcgattagacatcttgatggagttgtcgatgtgaatgttaatttattaagcaattcaatggttgttgagtatgatgaagatcaattaaatcaagcatcaattattcaggctgttgagaatgctggatataaagcagctttagaaaataattctgtgacttccaaacaacaggaagaaaatgttgatcataaaaaaaggtcattgattttatcatttgtctttttgattccattattttatatatcaatgggacatatgatgggagcacctttaccatctttgttgacagatcatgaaaatatgatggtatttgcattaactcaattatttttaactttaccgattatgtatattaatcgaggctattttcaaagaggttttcaagcattattacataagagtcctaacatggatacattaattgccatgggttcatcagcagctgcgatttatagtatttatgctatctttatgatgggttatgatttaggtcatggtgatatgagcggagctcatcaatatatgatgcaactttatttcgaatcagctgggatgattttaactcttatatcattaggaaagtacttagaatcacgttctaaaaagaaaacaacccaagcaattgaaaaactaatgaatcttatgccttcagttgcaactatacttgttgatggacaagaaaaagtggttgatattcaagacgtcaaaattggtgatattgttgtggtgaaatctggtcagagtattccagttgatggtgtcattgtaaaaggacaaacatcaattgatgaatctatgattacgggtgaaagtttacccgttgataaaggctttcatgatcaagtgattggggcaacaatgaatgtggatggatatattcatgttcaagcaactcatacaagtggagatacaactttgtcgcaaattatcgctttggtagaagatgccagttcttcaaaagctccgattgctaagctggctgatcaaatcagtggtatctttgtgccaatagttatgagtatatccttattaacgtttatcgcatggatgacacttggaggacaaacttttcatttcgctttaacatgtgcgattgctgttttggtcatttcttgtccatgtgctttaggtttagcaaccccaacagcaattatggtgggaactggaaaaggagctcaattaggtatcttaattaaatcggctgaaaatttagaacttttatcaaaggctaaaagtattgtcttggataaaactggaacaatgactaaaggaaagccacaagtcactgaggtttatccaattgatattgataagacagacttgttaaaaattgctggttctttagaaagtgcttcacaacatccaattgctaaagcaattgtaagttatattcaaagtcaaaatattgattttcaaacaattgaaaattttgagatgttacaaggtaaaggattaaaaggaaaacaaaatgaacatatctttttatcagggaatcaacgtttgatggaagaaaatcaagtcgatttatctgatgttcatcaattggcaagtgaactggcgatggctggtaaaacaccactttattatgcgcgagatggaatgattattggactaattgttgtaagtgatgttttaaaagagacaactaaggaagcaatccaacaattaaaacacaaaggtttgtctatttatatgttaacgggtgataatgcattaacggctaaagccataggaaaacaactcgatattgaagtcattgcagaagttctaccacaagataaagaaaaacatatcagagatttacagtcaaaaggtgaacgggttattatggtaggagatggaatcaatgatgcgccggctttgatgcgtgcggatattgggattgcaatgacatcaggaacagatattgctatggattctgcagatattgttttaatgaaaaatgatttacaagatgttgttaatgcaattgatttaagtcatgctgtgattaagaatattaaagaaaatctattttgggcattcttctataatgtgattggtattccaattgcggcgggagttttttatccatttttaggatggttattagatcctatgtttggggctgcagctatgagtttaagttcagtctttgttgtaagtaatgccttgagattaagattttttaaaccaaaaacaaaaagagagaaaacggaggaaaaaatgatgaaaaagaaaatgaatattgaaggtatgatgtgtgcacattgtcaagcacacgttgaaaaagcattaaatggtattgatggtgtaaaagctgaagttgatttaaaaaacaattgtgcttatttagaattatctcaagatgtagctgaagcaacacttacaaaagctgtggaagatgctggttatacagttaagggatttgaataatgcaagctgataagtcacaaataacacgtttgttaaaaacggctagagggcaaattgatggcattttaaagatgattgatgatgatcgttattgtgtagatatttctaatcagataatggctacacaagctattttgaaacgggcaaataaggaaattattggagcacatatgaaacactgtgttcatgatgccttaaatcaagaagatgccaatcaaaaaattaatgaaatgattgatattattgatcaattaatgaaatagagggaaacctctatttttatttgtcttaaaaaatagtataatagtatgcaggaggaaaaaatgatgcaaaatggtgtaatgatgcaatattttgaatggtatttagaaagtaatcctcatctttggaaacttttaaaagaagatgcaaagcatcttaaagaaattgggataacagcagtctggatgccacctgcttttaaaggaattggtggtattcatgatgttggatatggggtttatgatatttatgatttaggggaatttgatcaaaagggaacaattcgcacaaaatatggaacaaaagatgaatatttagatgctattggggctttacatcaatatggtttacaagtttatggcgatattgttttaaatcataaaatgggtgctgatggaaatgaatttgtcaaagcttatgaagttaatcaatataataaaaatcaagtgattagtgatgaagaattaatcgaagttccaacgctttttacctttcctaatcgtcatcagatgtatagtgattttacctggaattggacatgttttgatggaattgattatgatattttgtcaaagcgtcatgcaacatttttgtttaaagataagaattgggatagtcaagttgatgatgaaaatgggaattttgattatttaatgggggctgatattgatttttcaaatccacatgttgtagcagaattagagaattggggacaatggtgtttatcaatgactcatcttgatggattaagattggatgcagttaaacatattggtgctcatttttataaagattggattcgtgaattaagagtccattatcaaaaagaattatttactgtaggggagtattggcatggagatattcatcatttattaaattatttaaatgaagttgaaggtgaaatgtctttatttgatgtccctttgcattatcatttttatgaagcttcacatagttttggacagtatgatatgtcaaagatttttgaaggaacattggtggatagtgcgcccaatcaggctgtcacttttgttgataatcatgatacacaaccttcacaaggattacagtcatgggttgaagattggtttaaaccactagcttatgcattgattttactgagaaaagatgggtatccttgtgttttttatggcgattattatgggattccacattctcaaatcaaaggacaatctgatgttttagattgcttattatggttaagaaaagaatatgctttaggaaaacaagatgattattttgatgattcaagtgttattggatgggttcgttatagtgagcaacgctcattagcttgtattatgagtgatagtgttggaggaaccaaggatatgtatgtcggtgaacgttatgctggaaaaatattttatgatgccttaggttattgtcaaaatcaagttgtgattgatcaacaagggcatggtctttttaagtgtcagggaggaagtgtcagtgtctatatttgtcaggaggaaaataatggataagaaaagcttgctttctgttcatttggctgttttgttatttggaacctcaggggtttttattaaaattattccaatgtcagcgttattgctgacattaggacgaggaattttttcagccttggcactttatgctttcattcattttcgtgaatattcattacgtcttgaacgcttacgcgattatttttggaatttattggcaggaatctttttagcgatgcattggtttttatttattatgtcaatccaaatctcaactgtttcaattggaaccattacctttgccacttaccctttatttgttgtgtttttagaaccatatgtctttaaggaaaagtttcaactcaagaatttattaaatgttgctatgattgctatagggattgcttttctgattcctgcttttgagttaaacaatgccacaactttagggatcttatatggattaggcagtagtttttgttttgctatactttcaattattaatcgtcgtttagctgccttatatgatagtgttgtcattactttatatgaacaaactgttgctgcttgtctaatgacgattttgatttctattataaaaccaacagttcatgaaggaacagtacttgatttttttcatttgattatttatggtgttgtttttactggattagctcattctttatatattcaaggattaaaagggatcaaagcacagacagccagtattatttcagtattagaacctgtttatagtattgttttagccattgtctttttacaggaaagaatgagttatcaagaaatgatagggacatttattatttttgttactgttatgattgcaactttacaaaatagtgttgatgaaaaaacataaaatccatttcaaacgaaatggattttaaagtataatattgaaatataagagagtaaaacataaagttaagacggcagcaaattcaacgatgtttaaaatcatttgttcttgcttttgattcactccttttttctttgcttcataaagaagttgatatgttatcatgagtggaataagattgattatgcttaaaagtgaagtaaacaaggagaaaatagcaaaagcaagagttggtatataaaattcgtttttagtgtgttttatatcatcaccttcttcacttatattatataaaaactgaagaaatggactatcaagagtatcttaatattatgttaattttatttaaattcacataaacagtatataacagttgacaagtgttatatactgttatatactgttagtgaacagaggaggagaattatgaagattattattaataattcatctatgcagcctatttatgaacagctcatagaacaaattaaaaccatgattattcatggtgaactcaaagaaaatgataatttaccatctgttcgttctttatcaaaagaattaaagattagtgctttaacggtcaagaaagcgtacgataatcttgaaagtgaagggtttgtatcaacgattcatggaaaaggaacttatgtcaaaggcgctaatcaagagattttaaaagaagaacaaagaaaagaagtcgaaactgatttggaaatggccatccaaaaaggtcgtagatgcaacatgagtgatgaagaaataagtgaattatttcatttgattatggaggagtaaacaatgttaaaacttacaaatgttacaaaacgttatgatcaatttaccttgaattgctctttagacgtacaacctggatgtgtgactggtctcattggacaaaatggtgctgggaaaagcacaacatttaaagctattttagatttgatttcaattgatgatggtaatattcaaatctttgattgtcctaatcaacacttatcaatgaaatataaacaacaaattggtgttgttttatctgatagtggatttagtgaatatttgacaattcaatcaattattcctattatggatgctttatatgaacgctttgaaaaacaacaatttatacaaagatgtcaacaatttaatttaccactaaaaaaacaaatcaaagacttttcaacaggtatgaaagccaaattgaaagttctattagccttatcatatcatgctaaactattaattttagatgaacctacagcaggattggatgtcatcgcaagagatgaacttttagatatgataagagattatatggctcaagatgaatcatgttcaatcttgattagttcacatatttctagtgatttagaaggtttatgtgatgatttgtatatgattgataaagggaaaattattctacatgaggatacagatgttttattagatgattatgctattttaaaggtggatgaacaacaatattcttcacttgatcatcaatatattttgagatatcgtaaagaaaattatggatattgctgtttaacaaatcaaaaacaatattatttagataattatccatcattagtcattgaaaaaggttcaattgatgatgtgattacaatgatgataaggggtgaaaaatcatgaaaggattattaattaaagattttcaattacttaaaaatcaaaaatcatttttcgttgtctttattgcaatggcagttatctttttggttactgatatgatgagtcaggacttcttagtgagttatgtgagtttcttaagtattgtcataatgatgagtagtatgacttacgatgaatttaataatggattgagttatttaatgacattaccaaccactagaaagaaatatgttcaagaaaaatatgtctttggatttattcttcttgtcattgcctggatttctactttcttagcaacaactgctttttatcttggtaagggggaatcaattcctttatctgattggctaataacttgctttatgattttgttatgtgctgtcatcatgatgcaatgtgttttacctttacaattaaaatttggtcaaaataaaggaaatatagccatggcattaattgtgggagttgcttttgctattgggtttgtagtgatcagtatcgtgaaactttttgatatagatttaacttacttaatgtatatgatttcacaaatagatttagttcaaatggttgctattatgattgggttagctattattgttggattcatctcatatcgtattagtcttaaaattatgtacaaaaaagaattgtaaaataaaaaacaactttttcatgaagttgtttttttatgcttttttcttttttaaaacaaaagttgcaataataatgataacaagcatgactgcagcacagattccagctgttgaccataattcaggtttagcataagccttagaaacgattgcaatctttcttattaatatagcaagtgcgtaaccagaagttgcagcaccaataagtgcaaggactgctttaaaccattttgggaatacttctgtaaacaaaattgcagttattaagcaaataagtgcaataaaagcacaaatgacaaaatgcatagagaaacctcctttatatacatcatttaaaataccataaatagccaaagattgcaatataattgtgaacacatagatggaataatatcggaatttttgtgtaaaatgtagaattatgaaaacgtttatgataaactataagggcaaagaaaagaggtagattatgagatttaatagaaacaaaagatatacttattatagttcgtattcatcttcaaggagacaaagagtacgttgggatagaattgcaataattgcaggggcaattgttgttgtcgtaggcattgttatttggtttaatttaagtcgtattaagttaatgtttaaaggttattcatttggtcaacaaaatgatattttatctttagatagtcagcaagtttcagaaattttatcacatgataaaatgacacatattcaagattggattaaaacaagtcaaaatgttaaattttatgatgagtatgaagaatattatacaatccatgatgatttaaaagttaaagttgttgtttcaacagtagataagatttttagtaatcaagcatctaaattaacaagtttaggttatagtgatgatgaaatatggaaagtcttagaaactgccagtattgatgatttagattatttgattacaaagcaatatacttatgatcaaattaaaccttatatgcaggtgaaaggttttgctttccaagatatggaaaagtatatgaaagtatatgcacaaaaacaaaattataactatgctgtattatcaacaacatatcctttcattatttctgaaaataaagtaacaagaagttatacaatccaaaatcctgatgatattttaacattggttaaaaaaggatttcagttagctgatacatatgtaccaaaagatttagttcaacctaatattccagtggcacctgattgtgataattcaaaaatgcgtaaagaagctgcaaaagcattagaagaaatggcaaaagaagcgaagaatttaggctatgaattagcaattaatagtgcttatcgttcatatgcagaccaaaagaaaacatatgatgattatttcaagaaatatgatgccatcacagcagcaagtttagttgctcttccaggagcaagtgaacatcaaactggtttaagtgttgatttaacaagtacaagtgtcattcaaaagaaagctaaaggtgatgtcgctgtttttggtgatagtgaagaaggaaaatgggttgaaaagaatgcttatcgttttggttttgtcttacgtttcccacttgataaatcaaatattactgggattagaaatgaaccatggcattttagatatgtaggtaaagaagcggcaaagacaatgcatgacaataattggctgttagaagaatattgtttatatgaaggaattattccacaaattaaagaaaataaataatctagggatttccctagattatttttaggagaaagatatgaaaacattaattacaactttaaattctaaatttattcatacatcattatcattaagattattatatgctgcttgttatcatcaatttgatattgattttaaagaatatacaattaaagattctttagaacatattgttgatgatttattatcaatgaaattagatgttttggctttttcttgttatatttggaatattgaatatatcaagtcactttgttcaatgttaaaacaaagacaaccagagctttgtattattttaggtggaccagaagtgacttatgaaccagcttattttttagaaaaatatgctattgattatgtaataagtggagaaggagaaaaagcttttccaatgttattagaagctattgaaaaggatttggataagaatataagtggtgttagctatttaggtcatgtgacaaatgaagttgcaatggtagatttaagttatgtagaatcattagattcaccttatcatttaaaacaagatcaagcgaatatggctaaacgtattttatattttgaaacgagtcgtggatgtccttttcaatgtcaatattgtctttcttcattagaaaaaggtttaagattttttagtgaagattatttaaagaaacaattagatattatttgtcatagtggagctaagacaattaaacttttagatcgtagttttaatgctgatgcaaaacatgcaattatgattttagattatatttttcaaaactatcaggaaggacaacaatttcaatttgaaattaatgctgatgttttagatcaaagaattattgatttcattaaagagaaagctcctaagaatttattaagatttgaaattggtattcaatcaacctatgaaccaacgaatcgtgcagttaagagaattcaaaactttgaacgattaagtgatgttgttcaacaattaatgaaggatggaaaatgtgatttgcatcttgatttaattgccggactaccttatgaagattataatcgctttgctcaatcatttgatgaagtctttgcatttcgggctaaagaattacaattaggtttcttaaaactattaagaggaacttcattacgtcatgatgcacaagattatggttatatttatcaagcagaaccaccttatgaaatgatagaaaaccattggatgaaaaaagcagatattgaaaaaattcatatggctgaggatatgttagaaaaatattggaatagtggacgttttgtaagaacaatgaataaagtgatggaccaacaaacttcaccatttgattttttctatcagttcgcttgtttctatcaagatcatcattataaaaaaataggttatcagttagatgaattgtttatttacttagatcaatatttatcagatgattatcatgaattactgattcaagattatttatccttatttaaagttaaaccaaaaagatggtatcaaccaactttaagtgcaacttctagaaaagaagtgattaggactttagctgaaaaataccaacttgatcaagagttgttgtttagatatgcgattgttgagaaattacaggagggttatcttgtggtgatttataaagactatcaatgtaagatggatatttataaataacataagaaatgataagtccagcaataaaagagaatatcatatcttgcatggtatcatggacaccagttgtatagtgtcttgaagcatcatagttaaaaagaattaagccactgtattcaaaaacttcccataaaaaagcgattgccatttcgacacagttcatcataagataaaggtatttcttttctggaatgtgattttttaaggcgaaataagccaaaataacaaaaatagcaccggataaaaaatgcatacatttatcatagtaagggatattataaaattgacaacttgttcctaaaacttgagtaagataaacataaataagatattctgtttgataaagcttgtttttaacaaataaaagaggagctaataaaattacagaaatgaaaagcgtatattggaaatgtgtaaatccaatataaagaatagttaagatataaatggttaaagttatttgatatatttttttcatagttctattatagaaaaaataaatgaatttattcatggaggaaagaaaaatgttatcaatggtggattatgttcatgaaagaatacaatcatatcctaaagatttaataggtgtagattttactatggggaatggtcatgatacagtttttttagctgattattgttcatatgtttatgcttttgatatccaaaaagaagcctttgaaaaaactaaacagttattaaaagaaaaaaataatgtgcaattgattttagatggacatcaaaatatggatcaatatatcacttcttttgatattggtatttttaatttaggctatttacctttagctgatcatcatgtgacaaccttattaaaaacaacacaaatggctattaaaaaagcacttgctagtgttcaacaggttttatttattgttgtttatcctggacatgaagaagggtataaagaaagtttatggatagatgactatgtttgtcagttagatagccatcaatggaatgtttcgagttataaaatgttaaataaaaatcaagctccttatgtgattgaaatacaaaaaaagtcagtataatcattttgaattgtttcaaactaatcttgaaagaaggtgaaaaaccgtgagttcaagatcaaagcgattacttgttcctgaagccaagaaagagattgataaaatgaaatttgaaatttctgatggtgttcatcatcaaggtgaagcaatgtgtgatatttgtggctctgttggtggtacgattacgcgaaaacttgtagaactaggagaagaacagttaaaaagacaaaataaataagcagggtttcctgcttatttattaacataagatgtatttaaagtcaccctgagatacagagtaaattaaatcttctggggcatctttacagaaatggaataattgaccatcttcaattgttccattccaagttgcaacaacagtgatatcttcacttaattcttttaagaaggctaataaatcaattttattattctttgcataaagaatttttttattatctaataataatactttttgatgataagttgataagaaatttttcatttcatgcattaattgttcgctaggtgtatgggtaaatattttatctaaatcaacaattggaacgcctgtttcttgactatattcacgaattaatttagattttccacttcctggtttaccaataatgagtaaaagcttatgttgagcatcacttaattcctctattttcttattcatatccattgctatcttctcctttttatatgtttatctgtctttattatagcattaattgtaagcgttttctacgaataaagaaaagatttttgaaaaagaaaaatgcagcaataaaactgcattatttttgttcttcaatacaaagaatcaattgtccaagtaatgtatattcttgtaaatcatcaaccttaataatttcaggaatatattgttttggtaaataattttccatttctttttttaattcctgaatatgcggtatcatggtacaacatagaataacgacttcaggactcaccatactaacaatacttgtaattgttttagcaactagttctaaagccccttcaggagttttagccaaagaaatacgatcattagaaagatccattggtaaatactgagtttcaccggctaaatgaaaacgtcctctgactaattgtccattaataataatccccgttccagaaaaataattacttggttgaaagagaaatgccagggaagtatattttttttgtgaagcataataacctactgcagctgtattgacatcattaccaaaaacaaaggtttgttgataacgtgcatttaataaagataataaattacaatcttctaaaccatttacatttgctgaaacaatacaaccatcattgataatgccaggcatagaaatacctacagtatgaatatcaggatattgtaaaagaacggtatcaatgacatcatataaatcttgaatacaagttgttggtttaataatttcattatctaaaaggatagtgttttgttcatcatataaacgataagcaatatgcactcttaaactatttctaaaaatggataatgaaagtatttttgtattattgtgggttgcaatttgtaaagggagaggtgttgcactgctttgatctttacgactttgttttttatctaaagccgattgaattaaagctaaggttgtagctacatcatattttgcaaatacatgcggaggtattttaataacaatttgttcttttaaaatttcttgaacttttgcatgcatatacgaaatttgaggagccaacataataatatcatattgatcaccaacattaaaaagttcattgtatccaatcgcagtgatttcataattataatataataattgactcgcttcatttaatttagaagcaaaataagatgttgttaaaccaccactacaacttaaaagaatttttatctttggtttttcaacaagttgttgaatattatccatcatttctttaaataactcagtagcatgtttcattgttttcatttggaagtgaagatagaattcaatttcttgagttgttgtatttgttacactaagttcaatgatattcatacgattaaatataatttcactataactataatttgtttcaatcacaataatattatcatgtttttcatctaaatgaatacgacaatgtgattgatcttgaattaaaatccattccttaaaaatcattgtatgaatatcccttaagaattcatccataattcatcacctcttagtatcattataaagtgaaatacatattttttaatgatttttactgtttttgaaaaaattttttcaaaaatatttctttttactaaaaagagtgagattattttatctaattaagaaagataatcaataaaaaaataacatgtgttgatttatcaatgaaatcaaatacaattaacggaagaataagatgaaatattttatagtttacaaatttagtatatatttcttgattaattatcttgaattttttagaaatttttattatcatattgttcaatgaaacaggataattaatcaaactttggtcggggagattattatccttttttctttctataaccttagcataacaaaatgaaaaggtggaatttcactctttgagtaaaaggccaccagtaatcttaatgtgagggtaaactccatctaaaattatttagtctaactaattaaattaaagtatctttattaatattattgaaaagagaaaatgattctattgattaattcttaatattatcaaatcctctccttaatttaggtattttctttttctaactagggtaataaccattacgagttttcaagtgttttattttttaaatactgaaaaatcataataatgatcattactttgtatacctacataatccatcatataaaatccaaaatcacctaataaaatatcgccagttaaaaaagttgccatttcactatttaaaaataacaatggttttaccatctcttgaacatctgctaatcgtcctgcaacaccatctgtctttaataattcttctttcaatccatcagcaatcattttttctgtcatagcagttaaagtactgccaggcaataaaacattgatacgaatgttatgttctccaaatacttttatttttttcatagcatggtagataattgctcttttagataaaatatatgaagcaccatctaccatatgctttttattcaatttttctaactctacattgacagcatcccagccattcatatctgcaatattttgatattcatatatgtattctttccaataaacacccgccattgaagatataatagcaattgcaccatttgaattcattttttttaaagcataataatctaaaatatattggtttgcagtaaaattaacatggaatactgtttcaaaagagaatcttttatctgctgaaattcctgctactaaaaataatttatctattttatcaggaataagttcaaaagcctcatcaatagatttttgaaattctaaattaacttttatataatgtatacctttcatttggggatcaataatatctaagccatatatttctgctcctaaatgaatcagttcctcacatagacatctccctattcctgaagccgctccagtaacaacacatattttatctttataatttaaataatctttcatccttatctcctagtaccattaaatattttctgacataacttttcttgggcgtaaaaagaaaaaagtaccaaacattagaaatgcaattgaactaattataaacatataacgaacatttccatctgatatgttcataaattgtcctatgaaagaaaaaacatatacagagatagtaggaacaattgtagaacaagcaaaacctacacccaacgcagttgataattgagaactttttgtaactctacttagagagtccatacaataagtaacaaaggtcatatatccaaatccggataagacattacctatataaagcaaaagaagattttcagctaaagctacacaaagaaaaccacaagcaatacatagtagggttgttccaaaaagacgttttttaaatatttttaacaaatagctaaaaacaaaaccactaataaaacaagcaaacgaatgaacagaagatacatagcctgcatctaccgaacttcccattccttctgtaacaataatattggacatatagacaagaataggataaaggaaaaagataataacaccttgtgcaataatgaaaaaccatgtatcgtgactccaatttatacctttttgtttttgggatatttcatcttgttgtggaggagtaggcataatcattacgcaaaacattggcaataagactattaaatgatataaccacatcattctaacagaaatattgactagccacccacctattaaaataataatcatggaagaaagtcctgatacacttgatccatatcccaacatttttgatcttttttcatcttgataaaaagctgaaatacaagaagctcccataggcatgaaaatcccatacgcaaagccaaccatagctcttaaaaatattaaaacataaatatgacattctataaaaaagggagtcaaaccacctacgagtgcaaagccaaatgcaataaacattgtttgtttaaaccctatctttttgacaaatgtaccgcttaataaattgcccggcatactagctaacatacagattgttgaaaccatcgtaattgttgataaagaaacatcagggtataactctcctaaacttgctagagctggattgatgccagatgtgatacattgtaaaatataaattgacaatacacaaatagctaatactgaacctgatatttttgagtcgttcatttttcctatgcctccatcctataagacttcagataaatcaggataaccataaagactaattcctccatcacaagttaaacttacacctgtaatatatgaagcatcatcagataataggaatcttgctgttgtagcaaattcttcaggcttaccaaaacgttccataacaatgtttttataagcaacttggcatgcgttataattttgagtaagaactttaatagaaggtgtatctgttaaaccaggattaattgcattgactcttatttgtggtcctagttccattgcagcaacttttacaagttgtgcgattgctcctttcgatgaacaataggcagcattttctttcacaggaacaaatgagttaatggaagatgtaacaactatagcaccttttccttgttctttcatatattttccaactgacttaatagctcttgcggctccgaaaacattcaattcaaaaacccatttccatgaatcaatatcatcatctaatattaaagcactatgtcctgcacctggttgatacaacatcatatcaatacatccaaatttttgtattgtttgttcagctgctttgataatgtctttttcttgagtacaatcaacaggtataaatatggcttcacctccctcagcaataatttcttgaactactttttctccttgactgttttgaagatcagctattactacttttgcaccatcttttgcaaataattgcgctgtagctttacccattcctgaagctgttccaaaacctaagaaaactttttcttcaaatcgtttcatatttttatcctccttctatcttttattatagataggaagttcatatttttacaatttacgaaaatgaaaatcgtttcctctttgaacaaaaaattcaatcatatcattactcaactcaattaacttcttaatttcttcaactggtaaatcatcatcatacaatgaatcccatctttgaaaatattcttgactaatcaaatataatatttttccagcaatatctatttcatcttgatcaagatgtcgatgagcttgttttaatctttttagtaagatattctttcttccttgaatagattgtcgataaaaataattttgtggtgaattataatcatttgataatacaagattagaacttatttctttatgagtgcttcttaatacaaagaaaatatcatgaagaatcggaattgataataaatcagtattattaagtccttcatcaccttttgctaattttttataataatcatttattgaaatggtttcagaaacaagtttatcatataagtattgtgctaaatcatatttgtctttaaaatgattataaaaagttttcttacttaatcctacatattcacaaattttctctacacgaatatcatctatactcttattttttaaaagatcatataacccataagctaagattgattttgtatccattaattctttcatctcctataaagtattttgaaaacagtataacactggctcatctattaaagatatattttttataaaatgaaaagagaaattgattttattatttaatactcaatatttttcaatcatatttttgatttaaatcttttcttactcttattataataagaacttttttgactcatataagttatagtaaatgcaacaactacccataatatatctctagtaaagaagtcacagaatgcattacccacaaaaatgcttgttgaatatattgcgaccacaataatcataattgtcgttgtcgatattaatatcttattatttttgcgatcttttcatcttttttcagtttctcttttattcttttgtcttctttcaataatttatcaatactgatttgataaaggtcacttaaatttataatgttaataatatctggtaaagattttcaattcttacaatttgatatcatttgccttgaaataataattttctcagtaacttgttgctgtgttaaatcagcatttgctatagctttttttcatctcaatttcgatatatgagccctccatctgaaatgataataactctttttaaaattcatctattaataggctttgacactctttcaaaaacattgtcaaaaatcttttataagccaataaattttaatttgtaaaaaaagattacttctggattaacctatattataaacttattttaatggaaagcctttaactaccgaattttctttttctaaaaatttataaactttatcattaacttaggcaattggattgttgttgatgattgtatacgatttattgttaatcagattaggggcatctacaatataaccatcatttatttacttgatcaatattattttttgtttgaaagtataccttgtttgtcttttgtcttagaaaatagggggagattttgaatttagatttagcataatagatggttgatgtttgtcattccctactcatatactacattactattctacacaggcaataaatgcatattcaatttcaactttttgactaatagttccttcttgagtaactcttttcgtggataatgattttagatattaatttatgaactaactcataattcagatcactaatatgtttgcatctttcaataagactaatccattaactgatattatgtatactatcattttgtttagctaaatcttgataagttataaagttaacaccgattctcattgtattcacctcctatctgggggtataataaaatcacatagaatatgtttatttagtatttctaaaattaatttatcgtaagatatgctaaatatcagcatttagtgcgataaaagtttacttgataatgaagaaagaagatttttagtttttttgctgattacataaagtccttgagacttaagaatagctatactcaatcttagttagcatgacggttggaataattaagaagattgaaagaggtgcaacgtaatatcctagcacgaaagtattatctgctttagctgaattagagaataaccaagagatagatattttacgattgattatttttggataaatagaagggttttatcaaaaaaagattttgagtttgttaataatactcaaaaatatctaacatatatgtatatgaatgaagtattaatgagattttccaatatataatttaaaagactataggaaaatgcaatatgttgaaaaattaataaaaaaagattcatcttacaatattttggtagatacattagaaaaatattaaatagatgtagaacaattaaatgataggaattatattgtttctatttttgtaggagtaatatcaacattaatttcaattgatcaaaaatttaaaggagtaactgtgttatgtaatgctaataacaagaagatgttgaaatttttaatgctttgaaaacatttattacagaaatgataagaatatcaatattagttgttctgtttgatgatgaagaagttaaggtcattaatgaacataaaatgtgttaattaagaaaggatgattatgatgaaaataattgcatttactggagcaggaatatcaaaacagtcaaatattccaacatttatggaaagaccggatgtcagagaaaagttatttagaagttatgctgaaaaacatcatgaagaatataatgaagtgattagacaattaaaagcaaatatgaatggagcaaagcctaatgatgctcataaggcattggctgaatataagattccaatcattacaatgaatatagatggattacataaacttgctggaagtgatgctttggaattacatggtggattacctgaagatgatgagatggacaaggcttattctttatacaataagccagtcttatatggtgatccagccccaaattatcaaaaagcctatgaaatggtttatgatttaaatcctgatgatatttttattgtagttggatgttcatttcatacagcgattgcttgtgatttaagagaagtcgctaaatctagaggagcaagaattattgaaatacaagaagatgctgctcataatgtaagaattgtattagaagaattaataaaaaagtaagaaggggtgttcatcatgaaattgtatcatggaagtagtgtaattgtagagaaaccaagaatttttacgaataggaattataaagatttcgggtatggtttttattgtacagttattgaaaagtaggcaaagcgttgggttattacaaaaggaaatgctcatattgtcaatatttatgattatgatattgttgaaggaccaatggctgatgatacaatttggaattatgttgaagattttgtaaaagataatatttctagaacagcattctgggaattggtaaagttcaaatatccaactcatcaaattgtattttgcactgaagcagctttaaagcaaatcagttacgaagggagctattcactatgacaaataaatattttgaagatgaagcaattactgaaaatgatttgttttttgtatgttacatgattgaacgagtagcaagaaaacttcatcaacacaataaatatgtagtcaatacaattggatatgatgaactctatcatttaatgagtgtagcaaatgtattgcatagttcaaatccaaaacaagttgaagaagattggattaatgattatatgttggaaaaaggggattttgatattactcttgttgatcgagaattgtgtgataaaattcctacagaattagatatgggaaaagtttattcaagattaattgttgatacagcattgcctaatgaagattatgttttaggaatcatgcgtgtctacaataatgaaatttgcgaaacaattgataactataatggtagtgcatattatgaaccatcatatgttattgctagagcatataatgaaggtggattttaatttagaaaggaatgattttaatggataagatcaacccagaggaagctatgaaagaattaacgctcatgttaatgtatctttcaagatttactggagaaaaagatttttataatgcccagtattattcaacttggaaaggatatagttttcatgttattaatgagttagttgataatgaatacgtttttgatggaaaacatccatcaagaacaaaatctgttacttttagcgaaaaaggattagcagaagcacaaaaattattagaaaaatatcatattgatgattggaaaaaataatctgaacaaaaaaatcaaggcattaaaccttgattttttgatcatttaataatctgtctcttttgtttttgtagtgttgtagttgttgacagatttgttttttcatttgtgatgttaagtattcagcactaatgattgatgagactaacgaaagtataacagaaataggcatcaaataaacgaagaaaaagtcatcacttaaaaagtataagacaaataatatcatcgcaaaaataattgctttttttaaacttcgcatacctaaaaaatgattatacatttctttacgaatatttcgataagtatcttgtaatatagatataatttctgaacatttttcaattgttaaatcgtaatcattgacattagcatgaatatctattttaataggcattatttgcacctccatttgactacgaacactattatagcacgcttttaaaaaaaataaagacatttactagtaataaaaaaaggtgtatactcattattggtgagaaaaatgaaagcaattcgacattttagaacaataactaagcataaaatcaaagttatgacattatgttttcgtataggtttatataaacaaggattattgcatgatttatcaaaatatgcaccttgtgaatttttgactggagcaagatattatcagggaacaaaatcgcctaattctgttgaacgtgaagataaaggctattcacttgcttggctgcatcataaaggtagaaataagcatcattgggaattttgggtagattttactcgacaaggattactcccagctcgaatgccaaaacgttatgttttagaaatgttttgcgatcgcgttgctgcaagtatgacatatcaagggaagaattattcagataaatttcctttagcttattataaacgaggaaaacatacatatatcatgcatcctgattctcgagcattattagaagaattactttattatttagatgatcatggattggatgcaacaattgattatattaattcacgagatgatttaaaacgagactgattttttcagtctcgttttgtacatgattctctttcaattaaaaagcatggtaattgaatacgtacaggtgaaatgttttcattacgtttaaacgcatcaaataacattcttgctcccatatatcccatatcgaacgttggggcaaaaatcgttgtaagaggtggtgatgtataattagctgtatcaatattatcaaagccaataatagaaacatcttggggaactttcattccattttgatgtaaggctcttaaggctccaatcgcaattggatcactagcagcaaaaatagctgaaggaacttgctgagcttgaatcagattattcatcattgtaaaacctgattcaattgaaaaggcatcttcttttatataaggttgatattttatgttgttttcttcacaaaaacgaataaaatatttttttcttacatctggataaagttcactatcagtatattccttaccacctagatatccaatactcttatgttgaaaagaaactaagtaatcaataacacatttcatagcattcttaaaatctaaaacaatgctgcattcatgaatcggatcaatattcatatctaaaaagattaaattaggacaaatctttttaaaaatatccatatctttatgactgtattttccaatacaaacaagtccttcaatcccttctaaagaagcaagataatcaatatctgtacgaaatgctcttttaataacaatcttattttgaaaacaaaattcttcaactccttgacgaatcgataaataataaggatcctcagtttcttgaattggagacaaccattgaataattcctatcgtcataacagtttcatcaaattttctttttttcttgacatatcctaattgctttgcggcatcaaaaactttctgtcttgtttctaagggaacatttaatgacatatcattgtttaaaatccttgaaacacttgcactcgaaaccccagcaagcttagcaatatctttaattgtagccatattctcacatccttagtaccattctatcatttagtaaaattaaaatcaatatttactaaaagtaaacagtcataacttgatattcaaaacatatattaaaactggtgatataatgaaaaaatatctatgtattttcttgtgtttgcttttttctatcattaacgttcaagctgttgattttcagggtaaagcttatattgtgatggattcttataatcaaactgtcttagaagggaaaaatcaagactatgtacaaagtgttgcttccatctcaaaaatcatgacagccattgtagcaattgaaaatggcaatttagatgatgaatatgaaataggcgaagaagtgaatcaggcttggggaagtggcgtctatatacatattggcgaccatataaatttaagagatttacttcatggattattattgagaagtgggaatgatgcagctaatgtcattgctaaaaatattggtggagatattacaacttttgtaaaaatgatgaatgaaaaagcacaagctttaaaaatgactcacactcatttttccaatccaacaggtttagatgaagaagatgcagggaatcaatcaacagtttatgatatggctttattaatgtcttattgtagtcaaaattcaatctttaatgatatagttatgaaagaaagttataaacgtgaagatggaggaggaacatggcagaataaaaatcgtttattaaaagaatatgaatattgtgttggtggaaagactggttttacaaaaaaagccaagcgaactttagtgactcgagccattaaggatgatgtttctttggtgattgtgacatttaattgtgggaatgattttgaatttcatcaaaaaaaatatgaagaatgttttgaaaaatatcaaaagatattggttttaccaaaaggcatttatcaatatcatggacactcttttttgattgataaagatttatattattgtggtcaagatcaaaccaaagcaactttgcaacaagacgatgatattttaagtgtttatgtttcaaaagataaaatctatcaagttcaaaaagaaaatgggattcagacaatctttcgttattggcttattttattaggagaatttgtcaatggctaagatatggaaatggtgtgttgtcatctttttattgattggcttactcttacatcgtgaagaagatatgatgaatgcgatgatggatactccatatgttgtttttgatttagtaatgagtgttattctttcggcttgtctatggggtggctttttgaatattattgaacactcgggttttatgaattatcttgcttttttattgaaaccattattacgtctgatttatggtcctattcttgaacaagataatgtttatgcttatctttcatctaatgttgttgctaatttattaggcttaggttcattagccactttaagtggaattaaagcatttcaacgtttaaatgaattaaatcctcatcctaataaaccaagtcgagaaatgctgacgcttgttattgttaatacggctggtctgtgcttatttccatcttcattaattatgttacgtaaacaaatggggtcaacatctttatatgctttttatccatatatgttaataatttcaattaccattattattataggtctgttattacaaagggtgattgatcatgaataaaattgtaattattttcttattgattgtttttatcgatggtctttttaaacgctgttctatgtttgaattgtttattgatggcgtaaaagatgctttgactttattaaaaccaatctttacaaccttaatggcatttatgttatttgttcaactgttaagaagtagtggaacaatagaagttttaagttctttatttcaaccgcttattcaatcattacatttacccattgatatttttattcttggttttcttcgtcctataagtgcaaatgcatcgctttcatttttatattcattttatgaagtttttggcgttgatcatccattaagtcttttggcttcactaattcaaagtgggagtgatacaaccatgtatgttgttgctttatatttttcatcaattaaaatgaaagatacgcgctatgctttatgggttggtttaacaatggatttcctttcggttgtttttgctattatgatttatttaaaaatgtttgtttaatttaaaaatctgtgtataatggatacgaaaggacgtgagactatggaaagactacaaaaagcaattgcggcaagtgggttaacttcacgaagaaaagcggaagatctcattcgccaagggagagtcaaagtcaatggtgaagtcgttagtgaattaggctttaaggtgaaacaaggtgatttgattttagttgatgataaagccttggaaggagaaaacaaagtttattatgttttctataaacctaaaggatgtatttgttcattgaatgatgaattaggtcgagaaactgttattgattatttttctgatgttaaggaaagaatttatccagtgggtcgactagattatgatacgacaggtttattattgatgacaaatgatggagaattcgctaatttaatgatgcatccttcatcccatttagaaaaggtttatgaagtgactgttacaggacttgttaatggtgagacattgcataaattagaaaagggaatttatcttgaaggagtgaaaactttaccatgtaagattaaagttgttggtaaggataatgaacataagacaacgatgttaatgattaaacttgttgaaggtaaaaatcgtcaagttaagaaaatgtttgaaacaatggggcataatgtgaaaaggttacatcgtgtgcaagttggtggaattaatttaaaaggattaaaaccaggacgttatcgtatcttaaagccacaagaagtgaaagaattaaagaacatggcaatcgcaaaaaagaatactcaattgacaagataatgtcagattatagaacatctttatagaggtgttctttttttgtagaaatttgtatggtgaagtttattgcagtcaataaaatagtggttataatgataaccaaggaggtataatgaaatatgcgtagtgtggttttagatgaacaaaaagcaaatatgtgtggaatttgtggggcaaaggagccttttattgaatataaacaattggaggatattcattttatttggtgtaacaaatgtcatacaattactttttttaaacaacctcaaagtgatgataaaaaaagattgattgaaaatgaaatgaatttttataaaacagatttaaaaaaataaaaaaagatctcaaaagcgagatctttttcaatactattcgttaacaattgcaccaactgggcaagcttcagcagcttcttgagcagcagcttctaattcagcaggtacttcaccgataatgttttcagctaatccatcatcatttaaatcgaatacttctggacatacaccagtacatgctccacatccgatgcaagtttcatttactttatacattttttattcctcctatttcgttataaccctattataaactaattggatttatttttaaagattattttataatttttgtagttatgttataatgaatgaggtgataagaatggaaaaacaaacaagaattaacaaatataaagatttaagagaagaaatgaaagaagaagttgcgattaatcaacatcaaagtgttccagctattgatgaagatgatgatgactttttggcttttctacctcgtgatgaaaaaccaaagcttgatgatacattaatggagccattatcttatgaaactctaaaaaaagataatgaagaagttcgtgtggcattaaatgaagccaaagtgaatgttggtaaagaacaatataacacacgtttagatattttaaataaaattaaacaagaagaacatgttccggctcatggaggatatgttgaagaagatattgaagaaccacataaaaaaatgacattacttgaaaaattagcagcaatgtcaccagaagaagatgctgaagaattaagaaaatttgaagaagatttaacggttgcagatttgatgaagaatcaaaagaaaccaaaaagagaaaaggctgttgaagaaacaaagacagtagagtctaaaagaaaacaagctataatagaagatgaaatcgatgatgatgaggaagaagaaagtaaagttgtaactgtcttgaattatgtcattattgtctttattgttgtttttatagttttagctttctttattgtaaaacagttattattttaagactaaggggaaaccttagttttttaaggaggataagaaaatgaaaaaaatttcaattgcgattgatggaccagcagctgcgggaaaaagtactattgctaaaatggttgccaaaaaattaaattatacttatattgatacaggagctatgtatcgttgtgtcgcttatgcgactttaaaacagggattggcttttgaagatgaaaaagcggttagtgatttattaaaaaatatgcaaatagaaatgaaaccagagggaacaatttatttgaatggtgaagatgtaacatcttctattcgtcaaaatgaagtttcaatgggagcaagtattgtatcaaaatatcaggcagtgagagaatttttagtagaaaaacaaagagagatggctcaaggtggtggggttatcttagatggtcgtgatattggtacagttgttttaaaagatgctgaattaaagatttatcaaattgcaagtattgaatgtcgtgcattacgtcgtcataaagaaaatttggagcgtgggatggcatctgatttagaagctattaaaaaagaaattgcaatgcgtgatgaacaagatatgaatcgtcagatttcacctttaaaaaaggctgatgatgcgattgaaatagatacatctgaaatgtcattagaagaagttgtgagtcgcgttatggaacttgttgaaagtaaaatataggaaggaagtgaaggtatgcgcaaaggaattgttgcgatagttgggcgtgcaaatgtaggaaaatcaacgatttttaatcgtattgttggagaaagagtttcgatagttgaagatattccaggagttacccgtgatcgtatttatgcgaatgcttcttggttaacaagagagtttcgtttaattgatacgggaggaattgagttagcaaatgcgtcatttacagaacaaattaagatgcaggcgcaaatagctattgaagaagcagatgttattatttttgttgtgagtggtcgtgaaggtgtaacaagggaagatgaatttgttgcaagaatgttacaaaaatcaaataaaccgattattttagcggttaataaaattgatgatcaagcttttaaggatagtatttatgatttttatagtcttggaataggtgatccaattgcggtttcaggaagtcatgggattggaattggtgatatcttggatgagattgttcaattgcttcctcaagttgaagaagaaaaagaggaagatgttattcgtttttcaattattgggcgaccaaatgttggaaaatcttcattaacaaatgcaattttaggtgaagatcgtgttattgtttctgatgttgaaggaacaacgcgtgatgcgattgatacagcttttgaaaaagatggtcaaaaatattgtgttgttgatacagcaggaatgcgtaaaaaaggaaagatttatgaaagtgttgaaaaatattctattttacgtgctttaacggcagttgaaaaaagtgatgttgttttggttgttattgatggtgatcgaggtattattgaacaagataaacatgttgctggaaatgctcatgaagctggaaaagcagttattctggttgttaataagtgggatttggttgcgaaagattctaagacaatgcaaaagatggaaaatgaattacgtgaacaatttaagtatttagattatgctccaattgtttttgtttctgctaaagaaaataaacgtgttgatttgttattaccaatgattcaggaagtttatgctaatagtcgtaaacgtgtttctacaagtgtcttgaatgatgttttgattgatgcacaaacaatgaatccaacaacaacatttaatggtggtcgattaaaaatttattatgctaatcaagtgagtatttgtccaccaacatttgttttatttaccaatgatcctcaatatttacattttagttataaacgttatttagaaaatcgtttacgtgatgcgtttggttttgaaggaacgccaatacatattatttgtagaaagagggactaatatgaaggttgcaattttaggaacagggagttgggcaacagggcttgctcgtgttttaaatgataatggtcatcaagtgatgttgtatggaattaatccagatgaaattgatgatatcaatattagacattgtaattataagtattttaaagatgtgcaattagaagaaactattgtagctacttcttctttggaaatgacaattaaggatgcacattatattttaattactattccaacgcaatttgttagagaaactttacaaaaaatcaagccactcttaaaagaaaaagtgacaattattaatgcagccaaaggatttgatatgaatacgaatatgcgtatgtcagatactattcgtagtgttttaacagaagatgaaatcaatccggttgtttctttaattggtccatctcatgctgaagaagtggtggaaagaatattaactgctgtttgttcggtttctttggatgagtctacagctaaagatgttcagaaattgttttctaatcattattttagagtgtatacgtcaaacgatgagattggtgctgaatatggtgcggcatataaaaatgttattgctgtggcttctggggtgattgctggacttggttatggtgataatacgagagcagctttaattacgcgaggacttcatgaaatgagtctatatgggatgattaaaggggctaaacaagaaacttattttggtttgactggaattggtgatcttgttgtaacttgctcatctgttcattcaagaaactttcaggcaggatatgaaattggtcaaagtcatcgagcactggattttatgacacataatacaaagacttgtgagggagtaagaacttgtaaagtcattcatgatgatgtcatgagtcatgattatggaattgagacaccaatagttgatgctgtttatgaagttttatataaaaatgcctctcctcaagaagttgttgcttctttgatgaatcgtgatttaaaacctgaacaattataaataaaaagcatataatatcttaggtgataaaagtggataaacaagataagttactggataaggtttctagtaaaacacatgtttctaaacaagatattctttcgcttgcaagtgatttacaaacgaaagatctaaatgatgaaagaaatatcaaggaatttgtttataagatatcaaaaatgacaaataaacaagtgaaacctgaacaaatgaataaaattatttctattattcaaaataaccaaatacctcaagatattgataaattggtttagagtccgcggggactctttttttgttttaaaatatgctttaagcaattgattaatgtttgctttgtgctataataggagttaatcaaaaaactttttcaacttttttgccttaaaaagaagaaaaatgagactttgcaagcgtatatataagtataggggttatatttccttagagtttctcaactataaaaaggaggaaaatctatatgataaatacgcttacatatcaagaaccacaacaacagtccaaacaggataagattttaagaggattctttaaggtcaaggcccattttgccgatatcatcaatgccatgctttttgaagggaaagacgtcatccatgcgaatgagctgcttctatgcgatagtgatgaaacaatttattttgtctatgagaatagaatcaatgtcatggaaagacggcgtgatatattgatgcatgcaacagtcaatgggattcctgtttacatcggacttgagattcagtcaacgattaactattccatgccttataggctgcttctctatgatacaatgacctatcatttgcagtacaagctgattgataaggaccatagggagcatttcagacctacgggagtcatgagtacagttctgtatagtggagacaggacatggcatcaacctcattcactcctggatcgtattctggttccagaaccgttgaagggactgatgaacacctggaaagggaatatccgtgatatcaaggaaatcaatgtagagttgctcagaaatgagaaggtgaaatcactggtcagtgcagttcaaacaatctatagatggaacaaggatacgagcacaatcaaggaactggtgttaagcaaagaggttgcgatagtcgtagcagtcatgacaaacagtgaagaactagtcataaggatagagaaagaagaaagggaggaagtagacatgtgtcaggtactagaggaatttaaattagaaagtgaaatgagaggagttgaaagaggactcaaacaagggaaaatccaaaccattgtaaatgtaataaaaagtaaatttggatttgtatcaaaggaactgattatgaagatagaagaaagttcagatgataagatagatgctttaacaatcaagattattgatgcaagaagtgaagaagaactgatagagattttatcttaatacatagacaaacaattataacttgtacttataaaaaaataagtatataatgaatttaatgaaatgaggtggaaggatgtataaattttcttgctaaaactaagtgcatactaaaaggactctttttagcatgcccgcaagaaaatagacatccttttttatatcttttgataatgcgacaagtctattttcttgtcgcttttattattgaagggagtgaaaaaagatgtcgcttattcaagttaatcaattaacttttcaatatgaaaatcattatgatataatttttgatcatgtttcatttcgttttgatacaaattttaaaacagcgttaataggtagaaatgcaagagggaaaacaacctttctaaaattgttgatgggcgagtatgaatatcaggggaaaattattaaaagtgaagaatgtgagtattttccttatgaaatcaaaaataaagatttattgactttagatatttgtttagaaattgcaccagaaatacaatcctggcaattggaaagagaattgcattatttagatttagaaggtcaagatcttttctatcgaccattttctacattgtctatgggagaacaaacgaaagttttattggcagttttgtttttgaaaagaaattcctttttgttaattgatgagccaaccaatcatttagatactttttcaagagaggtcgttgctaaatatctaaaacgtcaaaaaggctttttattagtaagccatgaccgtcattttattgatatgtgttgtgatcatattattgcaatcaacatgacaacaatcgaggttgttaatggtaccttttcttcttggtgtgataataaaatgaaaaaagatgaacatgaagaaatgaaaaatgctagattaaaaaaagatatttcacgtttagaaacatctcgtcaaaaaactgcaagttggtcacaaagggttgaaaacagtaaggtcgcacatggaaaacgtgaggctggtgtgaaggctgataggggctatgtggggcataaggcggctaaaatgatgaaaaggtctaaaaatattgaaaaacgtcaaattcaacaggttgaggaaaagaaaaagctattaaaagatgtggaggaatatgatgatttaaaaataacacctttaacatattttcaaacaaatcttgtttctttcttacatgtatctttgtattatcaagaaaagatattgtttaaagatttaactttttctattcaaaataaagaacgtattttattaaaaggaaaaaatggttgtggaaaatccagtgtgattcgtgctttattgaatcaaccaattggaataaaaggagaaatcaatcgaggcagtcgtttaaaaatttcttatgttcctcaagattgttcaatgctttcaggaagtttcctttcttttgtagaaagctatgacgttgatacaaccttagtcatgacaatcttaagaaaattaggattttcacgttcacattttgaaaaaaacttagaggatttaagtgaaggacaaaaaaagaaagtcatgttagctatttcattagcgacctcagctcatctttatatttgggatgaaccattaaactatattgatatctattcgagaatgcaaattgaaaaaatggttttagaatatcaaccaactttattatttgtagaacatgattatttctttcaagaaaaaatcgcaacgaaagtcattgatttcgatgaacttatttgacaaaagagtcatgaatctataaaataaaggatagaaagtaatgagggtcaagatatgagaaatttggttgtaacagataaagatatttcaacacaattatttaaaaattcagtcattgttaatctcaataatattcattattcatcttgtacaggtggcttggaatgtttaaaatgtgccggagcttgttattttaaagatgatatgagtattatctctaaatggatgaatgattgtcagttgattatctatattacacgagtaaaatatggatgttttgatattccttttaagaagatgttagaaagattagtggttaatcatgaaccgttttattcactagttgatggggaaacatgtcatttaggaattagtcaattacgtaaaaaattactcgtgattggttatggtgatgtgaatgaagaagaaaagaaaatgtttaaagatcttttggatgaatcaacacttggtttttcttattcttcagtagatgcatatttttgtgaagaaaatgaattagaagatacattacgaacttttggaggtgttgatcatgagtaaaattcttttattgaattcaggattaaaacatgctcaagcctttgttgatccttttttaaagcgtttagaagttcatttatcaagtaaagaaaattgtgttgatgtaagaagtgcagaaaattttgatgaacgtacatttttcgaatatgatcaagttgtctttttgttttctattgctttagattcaattccatcatcaacattagaaatttttcaaaagcttgaaaatcaatccaaaaatcatacagaaatctatgctttaattgcttgtgatgagtatgaaccagaaaaatgtaatctatctaaaaaaattatccaaaaatggtgtcatcgagaaaatctacaatttaaaggaacattaaaaataggatctgttctctttattatgaaaagtgcttctaaatttgttgtttctaattatataaaaagttttgctagtgctattttgaaacatgaatctattgatagtcaagtgacaatgctgacagataaaatatttatgaaaatggcaaataaatattggaataaagaaattcaaagaaaacataaagaaaaaataaaaaaattaaaacatgaaaaaggtgagtaggatatcataatatcgctactcacttttttaaaaatgaatatgtttaatataatcaacgggaatccctattttattagccgcttcttcataagataaaccttgacttaaatatcgtttaacaacctttttcaaagtttcaccaacttcaatgacatgtccatcagggtcataaaatcttactgttctttgaccccaagcatgttcttttaacggatgaatcaaagggacattatgctcattaagttttatcatgaatgcatcaatatcatcaatttcaaaataaagctcacttgcatgatttaataaaacaatatcattatcatccttatgaatcaaatctttccatatctcataagattctaatacaatcccagatgagagtgttacacgaccatgaaaatctaataacacctttaaatctaaaatatgacgataaaaggcttttgaacgatctaaatcctgaacaattaaaacagtgtttttataacgcatacagattccttctttcgtttactattctatcataatttcttgaataagaacatatacaatattgtaaggattgatttctctttgtcagatgttgactgttctaaatatgaaaaaaaatcatatattgatgtgtaagaaggaggaagtatatgcaaacaatagatatacttaaagatattggaaaaagatgtgatggtgatatttatttaggggtggttggaccggttagggtaggaaaatcatcatttattaaacgttttatggaaaaggcagttattccttatattgatgatgctgatgctaaaatcagagcaactgatgaattgcctcaatctggtgaaggtaaaatgattatgactgtggagccaaagtttgtccctaatcaggctgcgcatatttttgttgaggataatttaggggtgaatattcgtttagttgattgtgtaggatatgttattgatggagcaaagggttatcaagatgaacaggggattcgttatgttaaaactccttggtatttagaagcaattccttttgatgaggcagctaaaattgggacccagaaggttattcaggatcattcaacaattgggattgtgatgacttgtgatggatctatttgtgaaatcccttcacaagattatgttcaggcaactgatgatgtcattcaagaattaaaagatattggcaaaccatttgtaattgtagtgaactcaaaagatccacgtagcattcaatgtaatcaattggttgaaaacctaaagcaaaaacatgatgttccagttattggtttaaaagttaatgaaatgaatgaagaagatattgctcatctattaaaagaagctttatatgaatttccaattcatgaagttaaaattgaagtacctagatggattgctttaatggattcttctcattggcttaaacaaacattggatgatgctttagaacaatctttacaagaaataaaacgttttagagatgttgaaactatcgcaacaaaaatgtgtgaatttgattttatcaaaaaagcttacttatcttctattgatacatcttcttcatcagcaactttacgtattcaagaaagaaaaggtctatataatgaaatattaaatgaaatattaggacaagaaaaatttgattcagcattatttttaaaacaaattcaagaattaatgcaaatagaaaaagaatataaagcctatcaaagtgctattaaaatggttaaacaaacaggctatggatatgctttaccattaatggaagatgttgagttgagtcaaccagaagtgattaaacaaggaccacgctatggaatgaagctggtttctacagcctcaacaattcatatgattaaagtcgatatagaatcaacctttgaaccaattatcggttcaaaagaacaagccgaagcctttattcaatacttacaaagtcatggtgaaaataataaagaagcaatctttgattgtgatgtatttggtcgtaaattaggcgatttaattaatgaaggaatgcgtgtaaaattggcttcaatgaatgaaaccgcttgtattagagtgcatgatattttatctaagatagtcaataaaggaaagacaaatgtgattgcaatagttttataaatttgttgttgctttgctgaaattgaaatgttatactactacttagatttaagtaggaggcaatgcaaaatgaataaaaaagaacttattgatatcgtttcacaaaagaaagatttaacaaaaaaagatgctgaagcgttagtagatacagtttttgatacaatgattgaaagtattttaaatggagataaagttttaatttctggttttggaactttcaaagtgaacaatcgtaaagaacgtaaaggtgtaagccctaaaacaaaagaagcgatgattattccagcaagtaaaactgtttcatttaagcctagtaatagattaaaagatgcaatgaattaatattgtatcttttttctttatattctgttcataattgtcgtatactataaacgtagaggtgatgaaaatgtggccattttattatgggttatatatgaataaatattatttaattgggactgtctttgtgatactggcagcattgttggctgtgtgggcccaaatgaaagtacaatcagcttattctcgttataagaagattcctaattctaaggggatgacaggagcacagattgcgcgtgagattttagatagtgaaggtttatataatattcaaatttttgaagtgaaagggaatttgagtgatcattataatccgggtaaaaaaacgattaatttatcaagtgatatttaccatgggacatcaattgcgtctttggcagttgctgctcatgaatgtggacatgcaattcaatacaaagatggatatgtacctatttctttacgtaatatgattttaccaattgcgaatgttggtcaatatttaggctggattgcaattgcagttggcttgttgatgggacatacaaagattgcttggatgggttttgcattgatgtgtggaatcttggcatttcagcttgtcactttacctgttgagtttaatgcatcttcacgtgctttggtaattttaaagacgcgttatttaaatgaaggtgaatatgctggggcaaagagtatgttatcagcagcggctatgacttatgttgctgccatgatttctacactagccagtatgttacgtattttcttgattatattaggaaattcaagagatgattaaagaccgaaaggtcttttcatttttgtttggaaattatctggttttgttatataatagattcactggaggtgcattgaatgaagaaacatacatttaggattttagttgtttgtttagtgattattttagcggtcgtttctttttatatgttatatgttcatgttccttactataattatcatcatcaattagatgagatcagaaatgaaatttgtgagcaaaatcattatgaatatatggattattttagtgagtatcgtggcaaaagtaaatattatatgttaaaggttaagattgatggtgttgagtcttatgttgcttatgatacgaagcaaaagttagttgatacttatcaaggagatattgctgatgaaaagagtgttaagaaagccattttagataaatataaagtgaatgttgatttagagattgcatatgaaaatcagcgttttgtatattatggtagagtacaggataaggaaagcttgttgtatgtttattatgatttatcaaatggtgagtttataaaagcagtaaggcttggtgaataggtatggatgaattattggaatatggttgtattgattttaagaagctattgattttaaaagcaaaatcaatgaagttaagtgatcaggaatgttatgtcttgttgttgattatgactttggatgagattggaataaaaccaattacaccttcacagattcataaaatctgttctttatctttacaacaaattgatgagactttaattgctttggttgatcatcattatattgcccgaatgaatggaagtcttgatttaagaccaattgagaatttattgttgaatcaaaagagtgaagatgtacaggaagttgatttggtttcggtttttgaagatgcttttggtagaagcttgagtcaaagagaggttcaaattattaattcattgaagtgtcaaggacatagtgatgatatgattattgatgctttggatgaatcagttaaatcaggggtaattacgtttcgatatattgaaaagatattggataattgggctaaatatggagtgaaaagaagatatgctccgcaacctattaaacaagaaaatatagatgttgaacaaagaataaaggattataaatggtgggaaaacgatgaataaagaaaaagtaaaaagaatattagatgcgtttgatgatatgtatccagatgcacagtgtgaattggttcatcataatgagttagagttattgattgcagttatgttatcggcacaaacaacagatgctagtgttaataaattaactcagagtttatttcaaaaatatcgttgtgttgaagattatgccaatgctcctttgtctcaactggaagctgatttaagaacgattggtttatatcgaaataaagcgaaaaatgttaaggcgatggcacaaaaattaattgatgattttgatggtcaagtgccttgtgatcatgacgctttacaaaccttacctggggtagggcgtaaaacggctaatgtggtcatttcagaagggtttaaagttccggctattgcggttgatacacatgtagaacgtatctctaagaggctaggatttgcttttaaaaaagattctgttttaacagttgaaacaaaactgcaaaaagcaattcctaaggaacgctggattaaaactcatcatcaaatgatattttttggtagatatcattgtaaagcaatgaatcctgattgtggacattgtccacttattgatatctgtaaagaacctaaacgtaaaaaatatttaaatctgactgaatagtcggattttatcaaaaaagataaccagctggtagtttgtcattaccataagaggtaattgttaaaccaacctttttggttatctttattttaccattaacagcttgacagacttcttcggtcattggaatttgtctgacaccgcttttcgttttgggtgtttcaatatagtactcaatttcactatctttcaatagctggtgcattacattgacggatttatccttgaaatcaagaatagtcctgttcaatccacaaaattctgcaacacgaagtcccgttcctaacaggataatgacttcatcatggtatttctgatagactttatcctgctccataaaggcaagcaggtttttttcctgttcgggagttaaaatttcctttggttttgtatcatcttccagcaccgtacttaggtcataattaaaaggatttttctgatacagtcatcctcaatttcactatataacgtccaacgtatcaatgattttttcaaattgtttcctttttatctggacacggtttccattcataatcagccagtttgcagttgggttttcctctgccagcttacgcagtttcttttctccgatatgaaaatatttagacgcttcctcaatcgtcagcgtgtatttttccctgattggcacatcagtatagttcatagtgtagcacctcctttactgtgtgttatcagaagcagggcggcggttcggaaaagaggtagagaaatgtttaatatcagaaaacaatgcgtgataaattccattaaggaaatagtgaagcgtgaaggaatgacagttgcggaagtccaagaacattttcggggagtgattgaggaagtacgcacttctgacgacccagaacaacaggcgatgtattgcaaactgtttggaagaaagacaccaacaccagaggaatttatctatgtgctgtcgaagcagacaggaaaagtgagattttgaacatattgtatgacttttagatgttggtgtggtaaaatataaaaaactgataaacttaaattgaggtgttgaaattgaaaaaaagaaatatattattttccatttgctttatgtttttattgatattttcactggctgggtgtgtttcaaaagatactgaaaaagataacgatacaatatcaaccaagaatatgaacttgatatgcgaagaaacggtatctccaaataaggagtatgttacaggagatgaagatatagtaaattttactgtggaaatatatcaaaataaagacaataaaattttagtaaattcaaaatctaattctgaattttttaaacctttgcaatatgaattggaatacgataaagaaataacaaaatcagatattgatatagaatggacaacggcaatgggaaatcccaatccgacaaaggacgaccaattaagtatagcttatgtatctatttcagaagatggaaatgtatttagtaaacgaaaaattagctttgctaataaggctattgaaattatcgaagatacattaaacaagaaataattcctttagtgtccttatgctttttatgaaaggggaaaataaatggacgctcatttctgaacgtctgggaatagaaaaggagcactttttgcacgttctgtagtctataaactattcaattttttcatgtttctataccgatgtgctgtactgtatctttgcataactcggatttccaacgtatcaaggctcattcattcgtagtaaataagtagtaaaatgtgattttgaaatccttgcaaatgctgatagatactgtgttttaggggataatcaaggttttagtagatttttttcttaaaaaaatactctatccaatcaaagtggatagagtatttttgttattgtgtagattgattagaagttgtaaattcatgcgaaggtaaagtttgtgtatcaccattagcttttgtttcaacgaatgttacagtatattttgttgctggtgatagatttgagaaagtgattgttccacttgtttcaagtgtctgtgattgtccatttaagctaaccgtaatcttgctgccacttggaacaacaacgctgtaactcatttgtgttgccgttggattagcaggtgtatagcttgctggctgagtacttccttcaacagtgattgtttgatcaatcttgttagatgtaccttcaccactttcaaaagcataatatcctgtcactttataagtaccagcaggaggcgtatagttaagcgttgctgtatttgtacttaatttttcactatgaacaatttttccattttgatcagtaatatctattgcataaacaacttttccataaacttgacttaaatcacctaaataaggtaatgtccaagaacgaccattgatagtatatacctttgttggtgttgaactttctgtcatactcttaggatcatattctgtgaagttaacattaatcttaccatttgtaaatgcggcactaaaggctgttaaattatttaatccagcgccattagcactacttccaggcgtatgtccttttttgaaatatcctgaaacaatacgatcactaggaactccactaccaggagcaacatatggataaataccagaaatacattgagcacttacaacatctgatggttttgatggataactattttttaaaccacctttgtgcacatatttagcaattaaggccgaaatttgattagcagctgttgtttgtggataacgccctttcttttgatcggcagcagtataaccgacccaaacactccatgaataatctggagagtaagcggccatccataaatctttacttttaccaactaagcttttattaggtgcgtgtttatcatggtttgatgttcctgttttggcaccaatttgatatcctaaatttaaagctgagtatgcaccagttccagcttttacatattttgtcatgatatcacgaatcatgaaagctgattctggagataaagcttgaactttttctttttgacatgtttcatcaaaattaataacttcgccagtttcaattaattcaattttttcaactgtatgtggttcaatatatgtaccaccattagcaatgactgcataggctgcagcttgttcttcaggagaaatacctgtatcccaactaccaattgcgtatcctaatgataatttttcattatacatatcaaaaccaaaaccttttaaatattcagtcattttttctgtaccgattttattaacaacttcttttaaagtctgaatagctgctaagttccaagattgtgataaagcttcactcattgaaacatcaccatgatatttcttatcccagttacttggcgtccattcaccttgactataaggaacatcatgaacataatgcgcagttgaataatttaagaattcaaaagctgaagcataagaaataattggttttaatgaagaaccaggttgatttctttgtccataacgataatttccactcttagccatattttctttacttgccgcatatgcataagttgttcccataggaacataatccctagcagctaaaacaccaatgacacgaccagttgttgattcttgtacacaagccccagtctgcaaatacttatcagggaatttaaatccatcaccattagatatatcatttaattttgattgtaaatcagtattgatataagttgtaatcttcataggtgttgtatttggatcataacctgttttttcaaagacttcacgtgttactttatcagcataagcttgatatttaccagaaccagaaactggattagatttaagtgtgttttctactggcacagcttttgtagcagcacattcctctttagaaatataaccatgcatttccattaaatctaaaattgtatcacgacgttcttgagctaattttaaatttttaaatggatcatatttatttggtgaatttaatgttccagctaataaagcggcttcaggtaaagttaagttttgaacttctttatcaaaataatatttactagctgcataaataccaatcgctttatttccataaccaaaataaatcttatttaaataaagctctaaaatttcttgttttgttgtttgagaagtggcttcaattgctaaaataatttcgccagcttttctttcaattgtttgttcttcttttggataataagatttcttaatcacctgttgagtaattgttgaaccaccaccagtgattctaccagccactaaattacccataaaagctttgacaatacgtggcaagtcaaaaccattgtgttcaaagaaacgtgaatcttcagcagccaccacagcatcaatcatgacttgaggaatatcatcataagagacattctttctaattccatcttgaccataagaataatattcttcaccgttggctgaaacttgaattgaagattcgttattcaacaatttctctttagaaaaaccttcaacttgtttaaaaataccaaatcccaaataaacaccagcactggcaactaacaaaacaaagactgttaaacaaatcttaatgattttttgtttttgctttttcttcgctaaagcttgttgaggcgttagctgtttatttgtttttttgacttttttcatcattcgtcctccttaaaatacacttcatcaatgattttgagataatcaagtctaggttgatacccttggggaatcaagtgacctaaagatttaatcttatcataagtcattgattttctttgagaatgataataatcgcaaattacaaaacttgcatcaattaagtatacctcatttagagtcgtgaatgcaataataacaaaagcaattcctccatgatcaataattctttgtaaatgatcaatttgatgtttagaaatatttccaaacggaaatgttttgacttttgtttcttttgcttcaaaatccacatatctacctttatatagaccattatagtcagtggttgaaggcgttttataataagcttcaacaatcttggcagattcacgacgtggataatctactttgacaatttgtataggggttggctttttataaattacagccagattattgtcaagataatattgattagataaagaaatatcttcttctaatgacatcccacgatgagctgtataatgtttactagacatcattggattttgtaagttcatcttttttttcatattgggataattgaccataacctcatcctttcatttattgtctccactattataacatatatttttgccgacttgtctaaattgtgtgggaaattcatctttttttaaaaatatcttgcaattagaagctaaatttgtgaaaatatgtaggaagaaaggtggatgtgtcatggctaataaaatacaattaagtcctaaaaaaatattaaataaacaatttcaaattgattttaaaggatatagcgcaactgaagttgattattttttagatacgattgttgaagattatgaaacatttgcaaatatgttaaatgaatcatatgaacaaattgaaaatcttcaaaaagaaaatgaagcattaaaaatgaaactttctaatttagaaaaagaacgcctcattcaacaagacaatattcgttcaatggaagaaaatctttcatcaaacgttgatttgttaaaacgtatttccaatttagaaaaagaaatttataaaaacaaggaataaaaaacttgtttttttatattattgcattttttttaaaatatagtacaataagtatgctcacgagaaccgattgctacgaaagtagaggaaagtccgggcatccacaatctgcgatgattgtagtgtttgtactgcgtctaataaatgcaggtagcattttgctaacgacagacctaagacctaaaccgtaaaggcatggttgataagtcataaagtgccacagaaactatgttgtcttgaaaaagacaaatgaaaagcggtaaactctgcaaggatgaaacccaaattttggtaggggaacttcattaaaggaaatgaacgataatgaagatgcatagcatagataaataatcggttgaaaaacagaactcggcttatcagagtgagcattatattttgtcgatgaaaatcgactttttttctagaaaaattataaaaaattcataacgaggacataaattcataaaataatagtgttggtgttgtcaaaacgaaaaatttgtgttttaatatgattattattgggtgttttgcgcatgatcaaaaggaggtacttttgtggataatttaggtgaaaatattcgtcgtcaaagagaggctaaacatttaacaatagaagaactttcggctaagacgaaaatctctgttgcagtgttaaaagatatagaaaatgggaagtttgaccgctataaaggtgatgaagcctatgtaaaaatgtatttaaaaaagatttctaatgttttgagtatggatactgatatggttactcaacaatatttagaattaacacgtgaaattgagttagaagatattaaagataaagaagttcaaaatcaacatcaagatgaggttgttaaaaaagggaagaagttttcttttgaagcgcctcaactggctagaaaaccttcagtttatgaggataaatcacatgtgacaattattagaggagccattatacttgtgcttgtatgtttagtgattgtagtgatttggtatggtttttattcaacccgttcaaaaactaaagatccaacttttgttccacagaatcaaacaacagttgaaggtgatgttgatacaaatgatcaaacaaatcaaaatgatgataatcagaatactccaactgatcaaacagaagcaaaagtagaatttacaagaaagagtcgtttagattttcaatttaaattgccagaaggtgtggaagaatttacgttaaagattgaatacaatcatgcctgctgggcacaaatgtatgtgaatggaaaatcatatgataaatttgtttctaaggtttatcatgattacagtgataaagataaaccagaaacagtggaattaacatttaaggtttcagaatttgataatttaagattacgtaatggaagtaacatgggacatcgttattatattaataatcaggaaattccattaacagaagaagataatgtgactggtgtcgctaatttcaatttaacattagagaaggaataatatgaatttaccaaacaagttaacaacaatccgtttagttagtgtcccattatttgttattatttatttaataccttatcaatcgttaggcatttcgatgcctacttttgatgttttatcaacaaagttatctttattagatttgattttatttttaatttttgttttatcggctttaactgattattttgatggttatttagcaagaaaaaataatcttgttacaacttttggaaagtttattgatcctattgctgataaattaattgtcaatactgctttattactattggcttcatccaatgatattaccattattattccgattatcatgatttctcgtgatacaattgtggatgctattcgtttagtggcaagtcagaaaaatgttgttttagcagcgagttatttaggtaaggctaagacgatgacacagatgattgcaatttgtattttgttattgaataatgttgtttttgaggcgattggtattccaatggatcaaatcatgatttggttagcaactgtgatttcagtcataagtggaattgactatttcatgaagaatcgtcaatatatcatggagagtatgtaaaaatggaagaattagcaaaattattaattgaaaaaggaatctcgattagtagtgtagaaagttttaccgtgggtggatttgccaatatgattggtagtatcagtggtatttcagcagtttatcgtggaagcttagtcagctatcaaacccgtattaaaagagatgttttgcatatagatgaaaaaattattgatcaatatggggttgtttcaaaagaagtggctggattgatggctatttctggagcgaagatgtttgatagtgatttatgtatatcttttacaggaaatgctggacctacagcgatggaaggtaaacctgtagggcttatttatattggtattgcatatgcgggaatgattcatacattatgttttgaattatctggtagtcgagaagatattaaaagacaagcgatattattggggattgaaaatattttaaaaattttaaaagacatataaaaatctgactagtaaggagggaaaaatatggcagaaaagaaaacaaagaaaactgaaagtcctgaagaaaaaaaggaaaaagcattggctgatgcaattattcaaattgaaaaacaattcggtaagggttcagttatgaaattaggtgaacgtgtggctgttgatattgatgttattccaacaggttcattaacacttgatgctgctttaggtattgggggttatccaaagggtcgtattattgaaatttatggtcctgaatcaagtgggaaaacaactttgacacttcatgcaattgctgaagttcaaaaacaaggagggcgtgctgcttttattgatgctgaacatgcaattgatccagtttatgcaagaaacttaggggttaatgttgatgagttgattttatcacaaccagatagtggtgaacaaggtttggcaattgctgaaactcttgttaaaagtaatgcgattgatttggttgttgtggattctgtagcagcacttgttccacaagttgaattagatggtgaaatgagtgataattcagttggtttacaagctcgaatgatgtctaaggctatgcgtcgtttatcaggacttatgaataagacttcttgtacaattatttttattaaccaattaagagaaaagattggggttatgtatggaaatccagaaaccacaacgggtggtcgtgctttaaaattctattcttctgtacgtattgaaatcagacgtagtgaagcgattaaaaatggtagtgagattgttggaaacaaagtgaatattaaggtggttaaaaacaaagtggcaccaccatttaaaacaacatcagttgatattatttatggtaaaggtattgcaagagatggagaaatcattgatttagctgttgaaaacaatattattgataaatctggtgcttggtatgcttatcttggtgaaaagattggccaaggtcgtgaaaatgttaagaattttatggctgaacatccagaaatcatggctgaagttgaagaaaaagttaaagcagttttatttgctgaggaaccagttgtagaaaaagcctaatttgaaggctttttttcttggctaggtttttatagtgttttttgatataatgttgatggggtgatgaagatggcaaattttacacaaaaagcattgatggcttcatttgcgaaactgttgaatgaaaagccttttgataaaataactgtgcaggatattgttgatgattgtggagtcaaccgtaatactttttattatcattttcaagatatttatatgttactagaatgtttattgcagcaagaaacaaaaaaagttcaggattctttaggtgatgatttgacttggcaagagtattttgaaattggtttggcttttgcggttcataataaaacggcagtttatcatctttatcaatcaatgaatagagaaacattggaatattatttaggacaagtcattgaaaatattttaagaaaatatattgatattcattatagtgaagcttgcattagtgaggaacgtaagaattttattattaaattttataaatatgggatgacaggaatatgcttagaatggatagctcaagagatgactgatcaagaagttcaaaggcattatattcaagatattgaaaagagttttcaaagaagtttaggggcttctttgagaaaataagacaagattaagacagtcaaataatggagtggttatggaagccattccattatttttatattttattgtcaatttcacaaaaatacggtataataaatttgtgcgttaaaagcactttatgaaatttatcataggaagtaggaggaatattatgccaggatcaggtgggcttctgactattttaacctatgttctagcagttggtttaggatttgcaatgtattttgttttaacaaaaatcaaagtatcgaaagcaaatgtcgatgcaacaaagattgttgaagaagcaactgccaaagctgataatatagtaaaagaagcgattttagatgccaagactcaagcgtatgaatataagcttgaagctgaaaaggaaatcaaagaacaacgcttagaagttactaaatttgaaaataaactattgcaaagggaacaaaacattgatcgtagagatattgctttacaaggaaaagaagatgttttggatgacaaagctaagcaattagaaaagagaagtgaagaactaggtaaattagaggctcaattaaaagaacaaattgatgcaaaaattgtggaattagaaaaaattgctgcaatgagcgccaatgaagcaaaagaagaattatttaaacaagtagaacaaaaaatggcgacagaagtcacagcttatatcaaagaaaaagaagatgaagcaaaatcaaaagcatctctttatgctaaggatattattgctgcggcaattaaccgttattctcaagaagaaacaattgaacgtacagttaatgttgttgctttaccaagcgaagaaatgaaaggtcgtattattggtagagaaggtcgaaatatcaaagctattgaaaatgcgactggtgttgagttgattattgatgatacacctgaagctattacaatttcttgctttgatccagtgagaagggaaattgctcgtttatcattagaaactttaattcgtgatggtcgtattcaaccaggacgtattgaagaagttgttcaaaagacaaaaaatgaattaaatgaagtgattcaaaaaactggtgaagatgcgatatttgaattaggattatctcgtgttaataaagaaattatcatgatgttaggaaaattgaaatatcgtacaagttatggtcaaaatgcattacaacattcattagaagttgcgcattttgctgggatgatggcagcggagttaggtttaaatcaacagttagctcgtcgtgctggattgttacatgacttaggaaaagcagttgatcatgaaatggaaggaagccatgttgaattaggagcaaaatttgctaagaaatatggtgaaaatgctacggttgtgaatgcaattgaatcacatcatggtgatgttgaagcaacaagtgttatttctattttggttgctgctgctgatactttatctgcagcacgtccaggaagtcgtagtgagacaattgaaaactatattcaaagattagaaaaattagaagaaatttctaagagctttgatggtgttgataaagtctttgcgattcaagccggacgtgaagttcgcgttattgtgaaaccagataaggttgatgatttagcaagtcataaacttgccagagaaatcaaaaataaaattgaaacggaattaacttatccaggacatatcaaagtgactgtgattcgtgaagttcgtgccaatgaaattgctaaatagaagataggtttgacctatcttttcatttacattgaaatgctttattgattatgatatcataaccacgttatacactttattatggagatgagaaaatgaatatattatttattggagatgttttttcagcaattggtagagaaatgattgaaacttatttaccacgcttaaaagctcaatatcatattgatgttgtgattgctaatgttgaaaatgcaacgcatggaaaaggtttaaataaaaaacattatgaagaatttttgtttcagggaatttctttgatgacaatgggtaatcatacttttgctaaaaaagaattatttgattatattgacgaagctgatcgtttggttgtgccttataatcaacctaaagcattacctggggttgggagtcgacaaattacgataaacgggaagaaaattcgtgtaacaaatctattgggaattacttttatggatgggaaatcacaaaatccatttgaagcgattgatgaaattttagctgatgatacgagtgatattcatattgttgattttcatgctgaagcaacaagcgaaaaaattgctttaggatattatttagatggacaagtttctgctgttttagggacacatacccatgtaacaacagcggatgaaagaattttaccaaaagggactgcttatcaaagtgatgttgggatgtgtggcccttatgaaagtgtaattggttgtgataaagagcttattattaaacgtatgaaaacaggtatgatgacaccttttgtggtggctgaaagtgaaggacaatttcgcgcaacattattaacttttaatcaagaaaatcaatgtacacaaatcaaacgtatttgtattgatccggctcatccatatatagcataatttatcctttcatgcatatagtgcattaaggaggaatttttatggaaatgattagagtatcttcatcatctaaaccaagtaaagttgctggagcattaacgagtttacttagagaacatcaaagtgttcaaattcaagttattggtgctgcagctttaaatcaagcaatgaaagcgatagctatcgcaagaggctatatggctccaggaggatatgagatttattgtacaccttctttttatgatttaacaattgatgatcaagtcattacctctttgcgtctaaatgtagaaatgcattaaaaaggctttcttttttgtctcaaaatgggtataataaaagaagaaaacaaggaggaaatattatggcaaaatgtaaattattaatgtctactgctcaaacacaaaaattaattgacttttttgatgggtatgaagatgataaagtaaaatgtaaatttgttaagaaaacaggaattaaagctgaaattgagtgtgaaactgaattaacaccagatgaagctgcttcatattgtaaaggattattcaaaaagacacctgatggagctgttttatacttctcaattcaaccagatggtttctttggttaaaaaataaggacaatgtccttatttttttctttcttattttataatatttgatataataaagcagaaagtggtgaaaatatgaaagattatagtgaatattttaaaggtccatctttaaaagatgcgaaacatagaggaaaagatgaaattcatcatattgatgatgcttatgaaattcctgctgatatggtaggaattggtaagggacaaaaatactttatccaaacatatggttgtcaagctaatgaacgtgatagtgagacattagctgggatattggaaagtatgggatatcaaccaactgatgaaattaaagatgctcaagttgttttattgaatacttgtgcaattagagaaaatgctgaagaaaaagtctttggaaaaattggctatttaaaaaaagttaaacgtacaaatcctaatattatttttgggatttgtggatgtatggcacaagaagaagtggttgtacaaaaaatcttagaaaaacatcctcaagttgatttgatttttggtacccacaatattcatcgtttaccagttcttttaaaacaagctatgttagaaaaagaaatggttttagaggtgtggtctaaagaaggcgatgtgattgaaaatttaccaagtcatcgagctcatccttataaagcttgggttaatattatgtatggatgtaataagttttgtacatattgtattgttccctatacgagaggaaaagaacgttctcgtttaaaagaagaaatcattgctgaagtcaatgatttaaaagaacatggttatcaagaaattactttacttggacaaaatgttaattcttatggaaaagattttgataatgggtatacgtttgcatcattgttagaggatgtcgcaaaaactggaattccacgtattcgttttacaacaagtcatccttgggattttagtgatgatatgattgatgtgattgccaagtatgaaaatatcatgccagctatacatttacctgttcaatctgggaatagtgaagttttaaagcgtatgggtagacgttatagtcgtgaacaatatttagaattgtttgataagattaaaaagaaaataccagattgtacaattacaacagatattattgttggtttccctggtgaaacagatgaacaatttgaagatacaatgagtctttatgaacattgtgaatatgatttagcatatacattcatttattctcctagagagggaacaccagcagcgaaaatggctgatgatattgacattcataccaaagaacaacgtctttatcgtttaaatgacttggttaatgaaaaatcattaatgcaaaatcaaaagttcttaaatcaagttgtagaagtccttgttgaaggaacatctaaaaaagatccagagatgttaacaggttatacaagacatcaaaaattaattaattttaaaggtcaaccagaacatattggtcaaattgttaaagtgaaagttactgaagtcaaaacatgggcattgaaaggtgaagaaattgaataaagaaattgaagataaagctaaaagattaaatcaatggattttaaatcaagaatttgtaaaagaatatcaaaagtatgaacagttgattaaaaataattcttcacttcatcaattagaagaagaattaaaagatttacaacaaaaaattgtaatgtctaaacatcaaaacattgattgtgaaataatcatgaaagaatatcaacaaaaaagaaaaagctttgatgaaaatcctcttgttcataactatttagtcttaaaacaggaagtcaatgacttattgattttgattcaagacaatattaatcaagaattgtcaaaaaaagattgacgaaagcaggaaaaatctatataatttcttcaataaattacaaaaataaacaaataaaggagagaaaacatggcatatttttttgatgaaccatcacacacatttaatgaatatttattagttccaggatactcaagtgcagagtgtcaacctaaaaatgtaagtttaaaaacacctttggttaaatttaaaaaaggggaagaacctgcattatctttaaatattcctcttgtatcagcaatcatgcaatctgtatctaatgatacaatggcagtggctcttgcaagagaaggtggagtttcatttatttatggatctcaaagtgttgaatcacaagctgaaatggtaagaaaagtaaaagcttataaagctggttttgtaccaagcgattcaaatattgcacctgatcaaacattaaaagatgtaattgaattaaaagaaaaaactggacactctacaatggctgtaactgaagatggaacagcaaatgggaagttagtaggaattgtcactggtagagattatcgtgtatctcgtatggatttagatacaaaagtatctgaatttatgacaccatttgataaattaattactgccccaagtggtgtatcattaaaagaagctaatgatattatttgggataacaaattaaatgctttacctattattgatgaaaatcaaaaattagaatattttgtctttagaaaagactatgaatcaagaaaatctaatccaaatgaattattagatgattcaaaacgttacgtagttggagctggtatcaatacaagagattatgctgaacgtgttccagcattagtcgaagcaggagctgatgttttatgtatcgactctagtgaaggattcagtgaatggcaaaaattaacaattgattggattagagaacattatggtgatagtgtcaaggttggagcaggaaatgttgttgatgctgaaggatttagattcttagcagaagctggtgctgactttgtgaagattggaatcggtggaggttctatctgtatcacacgtgaacaaaaaggtattggtagaggacaagcaacagcaacaattgaagttgcaaaagcaagagatgaatatttcaaagaaactggtatctatgttccaatctgtagtgatggaggaattgttcatgattaccatatgacattagctttagctatgggttctgatttcattatgttaggtagatatttctctcgttttgatgaatcaccaacaaataaagtcaatatcaatggtcaatatatgaaagaatactggggtgaaggaagcgctcgtgcaagaaactggcaacgttatgatttaggtggagataagaagttatcatttgaagaaggtgttgactcttatgttccttatgctggttcattaaaagataatgttggtttaacacttgctaaaattaaatcaacaatgtgtaactgtggagctttaacaatccctgaattacaagaaaaggcaaaaattacacttgtttcttcaacaagtattgttgaaggtggagcacatgatgttgttttaaaggattcaactccatctcataatcaataaaataagcgaaggtatagccgattggttataccttttttttaaaatttgtggtaatttggggaatatatcatatagtatatagaggtggatttatgagcaataacataagagagatttataccaaggcgattgtcgctaaaggcaagaaattatctaagaatacgtataatttagctttggcacaagtacctaatgagatattagggtgttggatatcaaatcatcactatgaagcagcaattaaaaatcgagttcctaaaattattgggacatttgatgttcatgtctggtacagttgtcatgatgaaatggattcaatggttgaaaaacatcaagtcacttatattgatgatatgcaggtgagtaaaaaagaaaatcgtgaatttgaagcgagtgatcaagtcaaagcacgttgtttgtcaaaaccaaaatgtttatctgcttatcatactaatgcgaatgtgacattagagattgaaaaagaaatgcagattgaaatcagtggggaaacttgtattaaagttgaagtgaaaaatgaagaagaagtttgggatgagtttgatgatattgaaattaatccagactttattaagaattcttagaaaaacgcgtgtgcgttttttcttttctttatttgtcaaattatgctataatattgtagttattaaggagtggtaaaatgaagcaaaaatattcgccaatgatgatgcaatatttaaaaataaaagaacaaaatcaagattcaattgttatgtttcgtttaggagatttctatgaaatgttttttgatgatgcgattgttgtctctaaagctttagatcttgctttaactgggaaaaatgcaggagctaaagaaagagttccaatgtgtggagttccttttcattcagtgagtggttatattcaaaaactcattgatttaggacataaggttgcaattgtagaacaattaagtgatcctggtaaaaagggtattgttgaacgtggtgttgttcaaattattactccaggaacaattatggatgcctcattaaatgagaaaagaaataattatattggagcattaggagtttttgattttaattatactttagcttattgtgatatttctacaggggagttctatgttgttaattttgataaacaagctcatcttttaaagaatcatattgatgctttgggattaaaggaaattgttgtgaatgatcgttctttaagttttgatgatgtttttgtttctttttatgaaaatgataaatttaatgaaggatataaaaagatttttgattctattactgatttaaaagaaatcaagatctgttcacttttattaaattacatgattgaaactcaaaaacgtgaattaagccatatgcaggcgattcaggaagttaaaactgaggactatatctatatggactcttatacgaaaaagtccttagaactggttaaaaatgcggatcatgaaagttatggaacattacaatggttattggatgaaaccaaatgtgcaatgggtggaagattacttcgtcaatggatagaaagacctttggttaatcgagaaaagattgaaaaaagaatggatattattgaattattaattgataattttattgaaagagaaactatgaaagatattatcaatgatatctatgatttagaaaaattagctggtcgtattgcttttggaaacgtcaatgctagagatttaaaatggattggttcttctttaaaagttattcctgaattaaaacatcaactattagccttagatcatcctgataccaatcaattagctcaacaacttattgatttatcacatattacgagtttaatagatgaagcgattgttgataatccaccactgacaataaaagaaggtggtctcattaaacaaggatatagtcaagaattagatgaactaagatatattcgtgataatgggaaacaatggcttagtgaatttgaacaaaaagaaagagaaaagactggaattaaaggcttgaagattggttataatagagtctttggttattatattgaagtgacaaaaagttatttatcaatggtaaaagatgaatttgaatatacaagaaaacaaagtatctcaaatgctgaaagatttgtaacacctgaattaaaagaaatggaagcgaagatattaagtgctaatgataagatggttgctttagaatatgaaatctttgtgcaaatcagagattatattaaaaaagatgtccatttaatccaagatgttgcaagtgttgttgcgcaaattgatgtttatcaatctttagctaataaagcaagtcaaaatggctatgtacgacctacatttaatgatcatcataccatgcatattgaaaatggtcgtcatggggttattgagcaagttatttcaagacaaaattatgttcctaatgatttaaatattaaagaagatgaacctatattattgattacaggaccaaatatgggcggaaaatcaacttatatgcgtcaaattgctttatgtgttattatggcacaaattggttcatttgtaccttgtgatcaagctgatttaccaatctttgatcaaatctttacccgtattggagcaagtgatgatttgatttcaggtcaatcaacttttatggttgaaatgttagaagctaacaatgctttacgttatgcttcaagagattcattgattatttttgatgaaattggtagaggaacagcaacctttgatggtatggctattgctcaatcaatgattgaatatatcgcaacatcaattcaatgtattacactattttctacacattatcatgaattaaccatgatggatgaatctttccatattcaaaatgttcatgcaagtgcatcagtagaaggtgataagattgttttcttatataaaatcaagccaggacgttcacaccgttcttatggtatcaatgttgctcaattagccaaattaccagatgcagtcattgaacgctctaaagtcatcttacaatctttagaaaataacaatattgaaacagtaatcagtgaaaaagtggaaatgccttctactatccaaaaagaaagtgctgtagaaaaagccttagaaagaattgatcctatggctttatcgccattagatgctttaagcacattaattgaacttaaaaaattattataagtgaggtgacaatatgcccaaaattagacaattagatgatattctttctaataaaatagctgctggtgaagttgttgaaagaccatcaagtgtcgttaaagaacttgttgaaaacagtattgacgcttcggcatcaagaattgacatttttattgaagatggtggtttacaattgattaaagttgtagacaacggtgaaggaatggaaagaactgatgcaaagatgtgtttttctcgtcatgcaacaagtaaaataaaagatgatcatgatttatttaatattatgacattaggatttcgtggtgaagcgattccttccattgcttcagtcagtcattttgatttaagaacatccacgggtcaagaaggaacttttgtgacttatgagtttggaaaatataaaaatgaaggaacttgtgatttgccacgtggaacgcaaatgacagtgactaagctttttcaaaatgtacctgctcgtttgaaatatttaaaatcagttaatagtgaatttgcagctattcatcaatatgttgaaagaatagctttagcttatccgcagattgcaattagactttatcataatgacaaggcaatctttcaaaccaatggcaagggtcaattgctagaagttattgctagtatgtatggaatagcaacggccaaaaatatgttacccattcatttagccaatgatgaattttcaattgatggttatatcagcaaaattgatacatcacgtgcttctaagaccaatattattacgcttgtcaatcatcgatatgtaaaaaatgcaatgagtatagatgcaattaataatgcttatcgtgcttatttggctgataatcgttatccgattgctgtgattaatatagaagttgatccttatcttgttgatgtgaatgtccatccttctaaattagaagtcagattctctaaagaatatgagttaagagatttgatttttgaaggagtcagtgatacattaaaacaagtcaatttgacttatcaggttaaaaacaaagaaacagaaagagaaacctttaaaccacagctcgatcaggtaacctttgacttagaagaaactccacctcttgtgtatcaagaaccagttcaagaagtgataaaagaagttaaagaaacttcaactctatatcaaaaacaaccaattattgaagaaagccaaccaattgaaaaaccaatacaacaaaaaccaatcaaagaaaaaatctatgctaaaacgcaaattcatgggacttatttgattggagaaaatgaaaaaggcatgtaccttgttgatcagcatgctgctcaagaaagaattaactatgaatattataaagaaaaattctcacatttagatttaacaatgcagcctttgcttgttccattacaattagaatatccaatgagtgagtttttggttttagaagaaagaaaaaatgttttagaaaaagttgggattcatttggaagtttttggtgaacatggatatattgtaagaagtttgccattatggatgaaaaaaattgatgaaaatatttttgttgatgaaatggtccaagaagttttacataaaaattatttagatgtcgtatcacttcaagaacatgcgattgctacacttagctgtaaggcttcattaaaagcgaatacttatctatcacctagtgatatgcaaacgattttagataacttgatgcgttgtgataatccttatgtgtgtccacatgggcgacctaccgttttattttacagtgattatgaattagaaaaactatttaagagggtggtttagatgaaaaaaggaattgtgagtctggttttagattttgttttaggtggagctgtaattatgatgatgagttatttttttgatggggtttatgtcaaagattttcaagttgcttttttagtggcaattgtcttggctttattgaatacttttattaaacctattttaacgattattgctttgccaattacaatcacaacgcttggtttatttcaactcgtcattaatggttttgttttagcgattgctcaaacaatctttgcccctgatttttatattgaatcttttggtttaacggttataacggcaattgtcatttccatattgtatagcttacttggaataggtaagatcaatgaataaggttattgtggtgattggtccaaccagtgttggaaagagtaaaatgggggttgaacttgcaaaagctttaaatggagaaattattagtggggattccatgcaaatttatcaaggaatggatattggaacagccaaagtaacaagtgaagaaatggaaaatgtgattcatcattgtatagatattctttcaccaaaacaaagttatagtgtgaaggattttcaggaaactgtaagaaaacaaattgatgaaattacgagtcgtggaaagttaccaattattgtagggggaacaggactctatatcaaagcagctttatacgactatgagtttagtgaaacaaaagatgatcatgaaacatataaagaaaaatataaagattatgataatcagcaattatatgattatttaaaaagcattgatgaaaaaagtgctttgacactgcatccacataatcgtcagcgtgtcttaagagcaattgagatatatgaacaaactggtcaacgaaaaagtgaaatcattgaagctcaacaacatgtctgtctttatgacgcttattttgttggtttgacattagagcgagaagtcttatatcaacgaatcaatcatcgtgttgatgtgatgagagatttaggactagaaaaagaagtgacagatttatatcatcaaggcttaaaccgtacatatcaaagtatgaaagctattggctataaggaatggtttgattattttgatggtcttataagtaaggaaaatgtttatgaaaatatcaaaaagcattctcgtcagtatgccaaaagacaatatacttggtttaagaatcaatttgatgttcattggtatcatgtcaatcttaatgattttcaatcaacagttcatgatgttttaagggatattttagcttaaaatatcctttttctgttctggcaaccaatggttgtcacttttctaagtggtggttgattgtctttgataggaattattgtataatggatttagtaaaaagagaggggatacaatgaaattacaagagaatttaatacgattaagaaaacaaaaaggtctttcacaagaagaattggcatatcagctaggaatctcaagacagtctgtcagtaaatgggagtctggtacatcggttccagaattagaacggttagttgagatttctgaattatatggggtttcattagatgaactggttaaaggtgaaaattcggttgttcaagggatggtgattacagatgaacaattacatcgggtcattagaaaaacaagagaatatgaatataagagtcgtttgaaaattggcaatttaccacttgttcatattaattttggatatggaaaaaaagttgccaaagggataatcgcaattggaaatattgctattggtgttttgagtttaggtggtttgtcattaggagttttatcgcttggtggcattggaatgggtttattaagtattggaggtttagcaatcggtggtttgtgctttggtggtcttggtattggttatatggcagtaggtggtcttgcgcttggtatttatgcttgtggaggtttagcgattggccaaactttggcaattggcggaaaagccattggtcatattgcgattggtgcgagtgcgacaggaaagtattgtctagaaggatcaaatatttctggtcgagagattttattgtttttacgtacaattcctgagtcattacctaattggttatttaatgctttgacttcttcaagtttttcaataatgaaaataaaataggccattttgaaatggtctattttttctttgtatgatttaattctttaattcgacttgttcttccgtgttttaaaatacgacgataattttccgcaagggctttttcataattgctggtcatccaaggaatatagaattgttcactttttaactgttcgggtaagtattgaatatattcccaaagttcaggacgactataatcgtatttttcatcttcttctagccctacaggcgttaaacgaagataagagggtgctggataggggtgggttgctaatgaggcaagagcagcgtctatagcgttttcagaagattttgatttaggtgatagacataaatcaataatggctgaggcaagtggaatacgagcttcaggaaaaccaatgactttagctgcctgaaaagccattactgtacgcatacaggcattaggattcgctaatccaatatcttcataagcagttgtaatcactcgacgttctaatgattctatatcttttgcttcaattaatttagcaaagtaatacatggcaccattaggatcactaccacgaatagatttttgtaaaccacttaaagtatcataatattgatcttcatctttatcaaattgtgcatttgctttttgaatagaatttttaaccatttctaaagtaatatttgtatcatcacttaaaacactcgctaattctaaacagttataagcataacgaatatctccactactcaaatcagcaatatattttaaaacatcatcttcgactttaaattcattctttaatcctttatcacttacaatggctttttttaatccatcaacaatatcatctttagataatggtttcacttcaataatttgacagcgtgaacgaatggcaggattaatagaatgataaggattagcagttgtacaaccagcaataaccaatagtccattttcaatatgaggtaataaatgatcttgcttatctttatttaaacgatgaacttcatcaataataacaaacaattcaccacttaattttgcttcctcaataatcatatccatttcttttttatttcctgttgaagcattaaaaatacgataaggaatatccaaatcattcgctaatgcacttgctaatgtggtttttccacaacctggaggcccatataaaatacaagacataggatgcttttttttaacgaattgggagaaaattgctttttctccaataatatgtttttgtcctaaaacatcttttaaagatgttgggcgcatacggtatgctaaagttgaagccataatatctttccttttcttttaaatttgtttataatgattatagcattttttataaaagaatgataggagcgagtttatgaaattagtcgtacaaagagttaaagaaagttcagttacaattgatggaaaaattcatggtcaaattgataaaggatttatggttttggttggtttttgtgaaggtgataatgaagtgattgttgataaaatggttgaaaaaatgattcatttacggatttttgaagatgcggcagggaaaatgaatttatctttaaatgatgttcatggagctattttatcgatttcacaatttaccctttacgcagattgtcgaaaagggcgtagaccaagctttattgatgcagcaaaacccgaagtagcgattcctttatataactattttaatcagaaaatagctgatagtggaattcatgttgaaacgggaatatttggtgctgatatgaaagtttctcttttaaatgatggaccagtaacaattatcttagatagtcaagatatttgtaaataaagaaaagacgcctttgtggcgtcttttaaggtaggagtttttatatattatactttgatacaatttcattcattgtatcccatttcttttccatgtcactgacaagtttgaattgtgtacgacaacgatctaaattatgagtaggatattttgttttaaaataagtatcaccttgaaggtaatcagttaaaaaacgcattccacattcaaacgtcatgacctttgcccctagtggcaaagctttaatttcttcatcagttaaacgtccatcacaacctttaatgaacccttttgtatagacttcaaaaagatgcatgtcacattcaatctttgataaatctttttcatcttctgccccagtacttgctccaaaacgaatcgaatccccaaaatcgttaattgccagaccaggcataacagtatctaaatcaatgacacaaattccttgatgagttttatcatcaattaaaacattatttaattttgtatcattatgtgtaacacgaagtggtaactcaccagaagcttgcatatcacctaaaacatgagctaaatcaacatgttctaaaacaaattgaatttctgcttgaacatcttttgcacgatgacagacatctttttcaacagcatctttaaaaacagcaaatcgtgctttggtattatgaaagtcaggaattgtttcatgtagtttttcagcaggataatcggctaataagctttggaacttcccaaaggcaagggcactttgataaaaatcttcatcacatttcacttcatcataaccagttgcacaagtaatgaaatgataagcacgccaatagttaccttcactgtccttataataaggttttcctgctttatttaagataacagttaatgtttctctttcaggatcaccaccattttcagtaattttttctcttagaaaagaagtcacattcatgatgttttccattaattcaacaggttttttaaagacattggtattcattctttgtaagataataggaacaactcccatatgaggaatcttatattctaataaatacgtatcattaatatgtccgcttccataaggttcgcattttaataaactaccaacaaaatcaaaatgtgaaataacttcttttaataaatattggttaatcatgatgatcaccccaaagcttttgaggatagataccttgatctttcatatcttgaatagctttcataatcactggtttatcttcacgataagtaacaccataccattgatcagctgtagttaaaacttcaacagttgctttttcttcatgaagtaaacgactaacaacactaggaatgaaatattcgcatttcaatggattttcttttaatcctacatctaagaaagcttgaaaaccattaccaatttcatccataatactttgactaaatccccataaattcattgaaacagttgcctttgctggtaaatcaatccattcatcatgatcttcataagctgctccagtttcagttttcttgatttttgtacgttctgtaatgttcacaagataatgattttcattcacttcacagacacctctagcaacagttccgttttctgttaatgtcttttcaatttgataaccaaccattgcgtaacgatatttttcatcatcttgatgagtagaaagataatcataaataatcttaaacgcatcaacaccataataatcatcagcgttaataacagcaaatggtccatcaatgaattcacgacaacaataaatcgcatgagcagttccccaaggtttcacacgatcacttggaacattgttacctgcaggtaaatcattaagctcttgataagcataatgaattttcattgttttttcaatacgattgccaatagcttctttgaaatcttcttcattttcttttttgataatgaaaatcacttcatcgaatccggcacgtgcagcatcatagagggaaaagtctatgatgatatgaccatcttgatcaatcggatcaatttgttttaaaccaccataacgacttcccataccagctgccataattactaatactggctttttcataacgagcctcctttaaatgctaacccaacggagttccattggttctaaattcaatgtttcaaccttttgacctttgatataaagatctgtagaaagtgcttcagttgtattgttaataacagcaatttgtccaacactttcaaaggctgcaacttcggtattgacattacttacataatatttcttcatttcatcttcacaaccagctgcccagtaaattgctcttaaaagaaggcgacagttttgtggagaatatggtaaaccggcaaagtaaatgcttcgaccttgaccaaaagtatttgtgactaatcttgcataaccatgatattgatttaagatttgataattttcaccatgtgcatagataccattcatgccttcaccaaaatcaatttcaccatcaatatcttctaataagaaatgatgaggatcgacttcattgtatttatcatgacttaaagtaaagccaacttctttatcaactcccaaaacatcacttaattggaagaattgaccttgatgctgataagctgttggttcaccaacaccaataaatccaccaccattatcaacccatgcacgaatacgtgtcacaacatcttcatcaatccagttttcagcaccagaccaagatgtataagcacttcctgcattaataacaactttaaattggtctaaagcaccgtttttaacatcatcaaagttaataaactctaaatcaataggcataccacttaagcattcaataatacccacataagagtagatttcacgataccaaatcgcatgatgaacttggttgttcatccaacgacgacatcctccccaacagtttaaaatagcaactttaaatggagaaacataagcacttgttccttgaattgtctcatgaatatttctgaattcatcaacaacatgtgtaattgtatcaataaatccaggccattctaatgcaagttttaaatatccaccataaccaatacgatctaaaggacttcttaaaatagcacgtctggcttttaaccagttggtatgtgcttcaccaattggatcgccaccttcacaaaaaacatcagggaagaagtaaggtaataatcttccttcagtgtatttcacacctttgatgtcagaaatcatacgcattgtcacaccatcaccgacagaaccaacaactgcatctaatccaatcgattcaaaatatggtccataaggttcagtaccaatccagtgatctcctaagaacatcatagcttctttaccatagctatgcacaatatcaactaattctttagcaagtttacaaacttcttgttgttggaagttaataaaatctttaaattctttagaaggaactctaaataaagaattatgataaccttgatctacaatgaattcaggacggaatttataacctgcccattcttcaaattttcttaggatatatggagaaacgctagcactataaccaaaccattcaacatatttttcacgtttttgatcatcaaatgttaaagtaaattgatggaagaaagtggtaaaacgaatgacatctacatgaggattatcttcacagaatttctttaatttttctttaacaaaaacttgagtttttggttggcgtacatcaaatgttaattgatgaggcgcatctttccaatcatttgtaataaagttatacatgtgaacaggatcccaaattaagaaagctaagaaactgacagtgtaaacatgataaggaattgtttcaattgtaacagttccattttcttcactgtaagtccatttatcagtaggaacaacttctccagttgtacgatcaataacttcccaccattcatgagggttatcaataaagtttggttttaattgttcagtatggaaccctttcattaatgtaattgttaatgatgattctcttgctgtataacgatcagtaattaaatattcttgttgaatttcttcaggattagctaaagcccaatcattatcttttctagttgtataatatgttgcataaatttttgcatctaaatccaagatttctttaggcatttcagttccatcacagtcacgaattgcatcagcacctaatttttcttttaatgcaattgtttgatcaataacatctaaatcagtaggaattgttaaacgaccataatttttcattgttagtcccccaaatcctctaaaatattaatttcagtatctttatcaaaatagtgtgttttgttcattaaataagtaaatgaaccttcatcatgtgctcttaaaggtgtacttccaggaactttaacaacgaatggtgaaccatcttttgtcatatgaataaagctttcagaacccattaattctacaacatcaacttgactttggaaagatgcttcaggatgatgcatgatgtattgaggatgagttgaaatatcttcagggcggatacccattgttacagtttttccaacatatcctttttcttttaagatttttgctttatcttcagggatttctaatgaaatatcagttaattcaatgaataattttccatctttttcactgatcattccatctctaaagttcatttgtggactaccaataaatccagctacgaatttattaattggatgttcataaaggaaagtaggggcagcgacttgttgaacccgaccatctttcataacgacaattcttgttcccattgtcattgcttcagtttggtcatgagttacataaataaatgttgtacctaattgttgatagatttttaagatttcaacacgcatttgaactcttaatttagcatccaagttacttaaaggttcatccattaagaaaacctttggttcacgtacaattgcacgtcctaaagccacacgttgacgttgaccaccagataaagcctttggtttacgttctaagtattgttcaatatcaattgcttttgcaacagaacgaacacgacgatcaatttcttcttttggtacttttgcaatttttaatccaaatgccatattttcatatacagtcatatgtggatagagggcataagattggaaaaccattgcaatatctctatctttaggagaaatatcattcattaatttgtcatcaatgtataattctccacttgatatatcttctagtccagcaatcattctaagggttgttgatttcccacagcctgatggacctacaaagacaataaattctttatcagcaatatctaagttaaaatcaaagacagcctgaacattattgtcataaattttatctatatgttttaatgataatgttgccataatatcctcctatttgtatctcttattataaatataaagtattaaaactaaaccagctaagccgataagttcaagtgttaatcccatgtaaccaacatttttttgcccatagaataaaagggcaaaagagataatgaatatcgctagtaaaataatattttgagtttttgtattcataatcatcacctaatcctttaatccaccaagggtcataccttgagttaatttcttttgaaccataatgtataaaattaatgttggtaacataacaatgacaagaccggcatacatcataccatattctgctttaccacgtgatgcttgcattaaagcaagtaacccgactggtaatgttcgattagaaccgctcattaacgttaaagcgataatgtattcattccagaatgctaagaagttaaacagaataactgttacaatactaggtttagccattggaatcatgactttaatcattgttttaaaataaccacaaccatcaatcaaagcagcttcttcataagcctttggcagtgtttggaaataactacttaataaataaacagtaaatggaatggcagtagatgcatagacaaccgctaagacaacaatgttatctaagaagaaacttatatttaaagtatcatcccagcccatcaacattaagaatattggcacaacaatgtagttaacattgataaacaaaccagccataaaaagtgtatttaagattcttttacctttaaacttataacgtgctaacacataagaagctggtaaagaaacaactaataaaataattaacgcaagagcagttgaaataacagagttaaagaaataacttcccatacttgctttttcaaaagcgttaataaagttttggaaatagaatcctgcaggtaatgcccaaggattactatagaattctttattttctttaatagaagccataaagacccaagctacaggaacgataattgaaatagctaaagtaattaaagcaacataaataaaaaccttgtataaacgatctacattatcaaatttctttttcatttatgccacctcctataattcaattggatctctttctgtagatttattcaaaataaagcttaatacaaatgagaaaataaagacaattgctgcaatcgccatcccataaccataacttgcattattataagcttgtttatagatataacctaaaacagtctgactggcaccatcaggtccaccagaagttaaagcattaaccaacaagaagctaatattgattgtactaataacgaagaatgttaaagttgtacgaatattatcccaaatcattggaagggtaatagagaagaattgtctaaatttaccagcaccatccaatgaagcagattcataaagatgttcagggatagatgacatactggccatatacataaccatataataaccaatagcttgccaaacaagtgccccaatgacagcatataaaacgatgtcttgatttcctaagaattggattgtttcccaagtttcaggtttaaataaagaaatcatactgtttaataaaccgttattagatgaatcatagattgctccaaaaatagaagaaataacaacaacagataaaatatttggaatatagaaaatgattctaaagaaattttgtcctttgattttttctcttactaaaatagaagcaaagataatggctaaagccattgtaataacagtaacaacagcaataattaaaattgtgttttgtaaggcatgaatgaagttcatgtcttgaaaggcagtgataaagttattgaatccaacaaaagttttgttggcagaaagtccgccccattttaaagtagacatccaaaaaacattaattgttggaataatcatgaacactgtaaataagattgtcgctggagcgagacaaatccatataaaacgtcttttttcttttgtcttgttcatatttttcctttctaaaatagcggtgtttttacccaccgctatttatttcatatttaattttaagatagattatttatcgtatttttgaacagctttgataactgcatcataccattgatcaacagttttcttaccagtcataacagagtttacagtaccatataagataccatcagcacttgttaagtcaacaccttcaattgcatcagcagcagcaaatccaactgcattagcttttgcaccattgtcatatactgagtaatataatttgttttgatcattttcacccattaatgaagaagcagtagtaattggcataacggctccaccattttcgtagaataatttagcagcttcatcactatagcaataagcgataaattctttagctaaatctttgttatctttgctagaagcagcaggaatgtacatttgttcaacgaatgttgtagaatatgcatcaccatcagcagttaattttggtaaagcagtgaatccccattcaaatcctttagctctaggagcatctttcatttcacctggtaaccaagttccatttggacagaataaagctttgttgtctaagattaattgttgattcttagtgaatccttctttgttagcgttagatacagtgttcttttcaatgtatttagctaattttccaacagtttcaaatgcttttttaacaccagcatctttccaagttgcagtatcataattcattaatttgttatatttttcaggtccaacagcttcatttaataatgcgctgaagaatgcatcgaaatatccagtagttggataagtgaataaagcaataccttcttttttagctttttcacctaattcaaacatttcatcccaagtttttggaacttcccatccttttgatttaaataatccagcattgtagaataaaccacaaggtccataattaataggggctaagtataattttccatcactatatggactagaagttaaagaatcagtaaatcctggaaggattttttctttaacagtttttccatctacttttaagtctagtactgaagaaatatcagtgatagctttttctttcactaatgtgtcagttaaaccaccttcagaaccaactgataagtaaatgatgtcaggaacatctttaccagaagtgataactggtcttaaagtatcagcaatgttcttttcgaattgtaattcaactttacaaccttttgcttcttcaaatttctttgcaacagcttcccatcctttagtaccataaccaccatctagtccagcaattttcaaagtttttccagatgcatcagcacctttttcttctttgttaccgccacaaccagctaggagtgtaccgcacataagaacagaaagtcctaaagataacacttttttagtattcattgtttttttcctccttcatgatatcttctaataacaatatacctaaatgtaaacgctttatctacgctaaaattgttataaattttatatatattgcttttgaatggtaaaaatagtaaaatatttatagaaagaaaggatgaagaagtgatatgagtaataataggatagatatttctaaaaagagtgacttggattttcccatgaatttgttatatattacatattcgaaatatgaaggggattggaattctttgatgcattttcatccttttactgaaattttttatgttattgggggaaaaggaaagtttgctgtggaaaatgaatcttttaatgtaaagaaggatgatatgattatagtgaatcctaatatatatcatcatgaagattcaagtggagatgatccattggagtatgttgttttaggggttgatgaattaacctttgatttaaatggagaagatcatttgtttttatatcaaagttttgataagaataatgatgatatggaatattatattagtcgcttattaatggaaagtgaaagaaaagaatttggctatgaaacagtttgccaaaaattatttgaattatttatgttgaaaattattcgtcagatgaaagtgaatttaagcaaggataatacacaattaccagctaaaagagaaataaggatgatttgtcattatattgatcttaattattcagaggatattacattagaatctttagcggattatatgaaaatgaataaatattatatggctcatgaatttaagaaatacatggggatatcacctatcaattatttaatagaaaggcgtattaaagaatgtaaatccttattaaggacaacaagtctatcaattgctgagatttctgaaactgtaggtttttcttcacaatcatatttttcgcagatgtttaagaaaaacaccaatatgacacctaagcaatttcgagatgcacaagcagtaaaaaatcctcaagatgacttaccagtctatcaaaaaaaatatatttttcaatcagatatctaaaaatatccccatgtgcagggatttttttaataaaaaaataaaaaagtgcaaaaaaagtaaaaaaaagacttgcaaagggagggatgagatggtattatagatgagcactcggcaagagggcagcaaacggacattgaaaactaaacagaaaacacgtcaataagaagaaacaaagaagagctagaagacagaagttgtctttagagatagacaatggagagtttgatcctggctcaggatgaacgctggcggcgtgcctaatacatgcaagtcgaacgcaccgcttcggtggtgagtggcgaacgggtgagtaatacataagtaacctggcctttcgagggggataactattggaaacgatagctaagaccgcataggcataattctcgcatgagagttatgttaaatatcctatgggatagcgagaggatggacttatggcgcattagctagttggtgagggtaacggcccaccaaggcgacgatgcgtagccgacctgagagggtggacggccacactgggactgagacacggcccagactcctacgggaggcagcagtagggaattttcggcaatgggcgaaagcctgaccgagcaacgccgcgtgagggaggaagtatttcggtatgtaaacctctgttataaaggaagaacggcgcatgtagggaatgacatgcgagtgacggtactttatgagaaagccacggctaactacgtgccagcagccgcggtaatacgtaggtggcgagcgttatccggaatcattgggcgtaaagagggagcaggcggcaactagggtctgcggtaaaagaccgaagctaaacttcggtaagccgtggaaaccgaggagctagagtgcagtagaggatcgtggaattccatgtgtagcggtgaaatgcgtagatatatggaggaacaccagtggcgaaggcgacgatctgggctgcaactgacgctcagtcccgaaagcgtggggagcaaataggattagataccctagtagtccacgccgtaaacgatgagtactaagtgttgggggtcagacctcagtgctgcagttaacgcaataagtactccgcctgagtagtacgttcgcaagaatgaaactcaaaggaattgacgggggcccgcacaagcggtggagcatgtggtttaattcgaagcaacgcgaagaaccttaccaggtcttgacatacccttaaaggctctagagatagagagatagctataggggatacaggtggtgcatggttgtcgtcagctcgtgtcgtgagatgttgggttaagtcccgcaacgagcgcaacccctgttgccagttgccagcattaagttggggactctggcgagactgcctctgcaaggaggaggaaggcggggatgacgtcaaatcatcatgccccttatgacctgggctacacacgtgctacaatggacggatcagagggaagcgaagccgcgaggtggagcgaaacccagaaacccgttctcagttcggactgcagtctgcaactcgactgcacgaagttggaatcgctagtaatcgcgaatcagcatgtcgcggtgaatacgttctcgggccttgtacacaccgcccgtcacaccatgagagttggtaacacccgaagccggtggcctaaccgcaaggaaggagctgtctaaggtgggactgatgattggggtgaagtcgtaacaaggtatccctacgggaacgtggggatggatcacctcctttctaaggagaagaagcgtggaattctgtttagttttgaatgtctgagaggacattcgagagaagtaggaacattgaaaactgaatagcaaactagcaaaaactttttacaagaagaagatagatgaagaagaaacgagatcaggagtgattgaaggtcaattcatctagttgcaaaaaactaagaaaaaacgagaaaaaagtatagaacttgaacactttaggctaagcaagaaagagcgtatggcggatgcctaggcactaagaggcgaagaaggacgcagcgaacggcgaaacgcgacggcgagcagtaagcaggcaacgacccgtcgatgtccgaatgggggaacccatcattccgagagggatgatatcgtctgatgaataaatagtcagacgaggcgagacgcagggaactgaaacatctcagtacctgcaggagaagaaagtaagaacgattccgtgagtagcggcgagcgaaagcggaggagcccaaaccatcgtaaagatggggttatagggctgccaataaagtcgacttgacatgataggagaagcgcaggggaaggcgcagcgaagagggtgacactcccgtatccgaaatcgtggagagaggcgaggcagtacctgagtacgtcggggcacgtgaaatcctgacggaattatcgaggaccatctcgaaaggctaaatactccttagtgaccgatagcgaaccagtaccgtgagggaaaggtgaaaagaaccccgggaggggagtgaaagagaacctgaaaccatatgcttacaagaagtcagagcccgttaaagggtgatggcgtgccttttgtagaatgagccggcgagttatgatatggagcgaggttaagcgggagacgcggagccgaagcgaaagcgagtcttaatagggcgacagttgcatgtcatagacccgaaaccgggtgatctagccatgatcaggttgaagttggggtaaaacccgatggaggaccgaaccgacccccgttgaaacgttggcggatgaattgtggctaggggtgaaattccaaacgaacccggagatagctggttctccccgaaatagctttagggctagcgtcgcgcgaagtcacgtgaaggtagagcactgaatatgtgatggcctcatcccgaggtactgagcataatcaaactccgaatgtcacgaggacatgcgcggcagtcagactgcgggtgataaggtccgtagtcaagagggaaacagcccagaccatcagctaaggtcccaaaatatatgctaagtggaaaaggatgtggagatgtccagacaaccaggaggttggctcagaagcagccaccctttaaagagtgcgtaacagctcactggtcgaatgactctgcgccgaaaatttaccggggctaagcataataccgaagctatggatttatagagaatataagtggtaggggagcgttccagtcagcgaggaagcatgatcgtaaggacatgtggagcggctggaagagagaatgccggtgtgagtagcggcacgtgggtgagaatcccacgcaccgaagacccaaggtttccagaggaaggttcgtccgctctgggtaagtcgggacctaaggcgaggccgagaggcgtagtcgatggacaacgggtggatattcccgtacctggcgtgagggcgatggagtgacggagaaggctaggcgatccagctgctggaatagctggtgcaagcgaggtaggggacatccaggcaaatccggatgtcataacccgaaggcgtgaagcgtatggaacattacgataagtacagaagtcgccgaagccatcttccaagaaaagcttctagcgatacctcaagtcagcccgtaccgaaaatggacacacatgggtgaggagagaatcctaaggtgagcgagagaactatagctaaggaactctgcaaaatgactccgtaacttcgggagaaggagtgctcagtgaaagctgagccgcagtaaaacggcccaagcgactgtttaccaaaaacacagctctctgccaagacgcaagtcgaagtatagggggtgacgcctgcccggtgctggaaggttaagaggagtggtcagtcttaaggcgaagccatgaattgaagccccagtaaacggcggccgtaactataacggtcctaaggtagcgaaattccttgtcaggtaagttctgacccgcacgaaaggcgtaacgatttgggcgctgtctcagctgtagactcggtgaagtcttagtacctgtgaagatgcaggttacccgcgactagacggaaagaccccatggagctttactgtagcttgatattggattttgatgcatgatgtacaggataggtaggagactgggagacggatacgccagtattcgaggagtcgacgttgggatactacccttgatgcattgaagttctaaccggacgtcgtgaagccgatgacgggacagtgtcaggtgggcagtttgactggggcggtcgcctcctaaagagtaacggaggcgcccaaagataccctcagcatggttggaaatcatgcgcagagtgcaaaggcagaagggtgtttgactgcgagacatacaggtcgagcagggacgaaagtcgggcttagtgatccggcggtgccgaatggaagggccgtcgctcaacggataaaagctaccctggggataacaggctgatctcccccaagagttcacatcgacggggaggtttggcacctcgatgtcggctcatcgcatcctggagctgaagtcggttccaagggttgggctgttcgcccattaaagcggtacgcgagctgggttcagaacgtcgtgagacagttcggtccctatctgtcgtgggcgtaggaagtttgaggagagctgccctcagtacgagaggaccggggtggacagaccaatggtgcaccagttgtcacgccagtggcacagctgggtagctaagtctggaagggataaacgctgaaggcatctaagcgtgaagccccctccaagatgagacttcccatttcgaaggaaagtaagacccctctaagacgaagaggttgataggtcaggggtgtaagcatggcgacatgctgagctgactgatactaataggtcgagggcttaacctaagaaggtagttcaaggagagagaagctagttactgttcagttttgagcgttcgtgctcgcaagagatctggtggcgatagcatgatggaaacacctgtacccatgccgaacacagaagttaagcatcataacggcgaagatagtgagcgattgcgacaatagcaagctgccagttctcctgagggatatcatccgatatctctctttttttgtttatatttatatttgaagtttattttctgatatatttaggtacaaaaaaacacaatgctcttataaacattgtgttttgttatcttattttttagttaatagtttagctgctgcttcatcagcaatgattgtacaatcaggatgatcttgtaaagcactagctggaatatctacagtcttaggaccttcaacagtaccataaatagctttagctttaccttcaccacaagcaattagtaaaacttttttagctttcataatattagcaattcccatacttactgcttgagtaggtacatcttcgattttaccattgaagaataaacgagcattgtcttcaatcgtagattgttttaattcaactttatgagttactgaatcaaatggtgttcctggttcattaaaaccaatatgtccattagaaccaattcctaataattgaatatcaataggattttcttctaataatttgttataagcatcacattcttcatcaatgttaccttttccttttggaacatgaacattattcatatcaatatcaagttcatcaaataagttatggcacataaaatagtgataactttgaggatgagattgatcaagaccaaaatattcatctaagttgaatgatttaatgtctttataagaagtcccgtttttcttatgatcttctctcattaattcatacattctaataggtgtagatcctgttgctaaacctaaatttgcttttggattgttttttacaacgtccaacataatttcacaagctttttgacttgcttcttcataatctttgacaataatgactttcatttgtgtccctcctatatctatataatcattatataccaagggggtcgaaatgaaaaggttattttttcatattttgaaaattttaaattaatgaaattttactaaataacaacaattattctttattttatgctcaaaataaggtaaaataagactatatggaggtaggtcaaaatgacaatgataaaaggtattgcggcatctaatggtatcgctattgcaaaagcatacaaattagttatgccagatttaacagttgaaaaggtaactgttgaggacgtagaaaaagaaattaaagcatatgaagatgcaatggatcacactgcaaaggaattagaagttattaaagaagcagcttctaagaacttatctgcagaagaagcagcagtttttgatgcacatgcattagtattatctgaccctgaattaaaaactcaagtagaagataaaattagaaatgaaaaatgtaacgctgcagctgcattagatgaagttgctgctatgtttatttctatgttcgaatctatgggtgatgaatattttagagaaagagctgctgatattaaagacgtttctcgtcgtttattagctaacttattaggaaaaccattacctaatcctgctttaattgatgaagaagttgttattattgctgatgatttaacaccatctgatacagctcaattaaataaaaatttagtaagaggttttgcaactaacattggtggtagaacatctcactcagcaattatggcaagaagtttagaaatccctgctgttgttgcttgtaaaacaattacagaagaagtgaaagacggagatatgattgctcttgatggtattgaaggagttgtcatgattaatcctgatgaagaaactattaaagaatatgcaacaaaacgtgatgaatataaagcatatcgtgaagaattaaagaaattagttaatgaaaaaactgtatctactgatggacatcatgtagaattagttgctaacattggttcaccaaaagaccttgaaggagttaaggaaaatggtggagaaggtgttggattattcagaactgaattcttatatatggaatctgctgaattaccaagtgaagataaacaatacgaagtttataaagaaatcttagaaggtatggctggtaaaccagttgttgtaagaactttagatatcggtggagataaagaaatcgaagctattgatttaccaaaagaaatgaatccattcttaggtgttcgtgcaattcgtttatgcttccaaagagaagatatctttagaactcaattaagagcgttacttagagcttcagtacatggtgatttaagaatcatgttccctatgattgctgttttaggtgaatttagaaaagctaaaggaatcttaatggaagaaaaagaaaaattgattgctgaaggtgtagaagtttcagatactattcaagttggtatcatgattgaaattcctgcagctgctgtattagctgatcaatttgctaaggaagttgatttcttctcaattggaacaaatgacttaattcaatatacatttgctgctgacagaatgtcatcaggtgtatcttacttatatcaaccatttaatccatcaattttacgtttagttaaacacgttattgattctgctcataaagaaggtaaatgggctggtatgtgtggagaaatggctggtgaaccattagctgctccattattattaggattaggacttgatgaattctcaatgtctgctacatcaattttagctcaaagaaaattaattagaggattatctcaagctgaaatggctgaattagctaacaaagctattaactgtggaacaatggaagaagttgttgcattagttgaagaagcaacaaaataacatataattaaaaaaatcaactatcttttagggtagttgattttttatatcatcaattatataacagacatcatattatataattttaaaagacgtatatcttctttagaaatcttgagtaattgaataagattttgatcttcttttaatttcttttttgaaaataacattttggcagcaaccggcatcattggtcgtgatgagaaaccattaaataaaccatattttgtatcattatctaaataagaagctaagatttgaacacttgctttctccattggagaatcttgattggttaaaataatatttgttaaagcatcaaagtgttccatatatccccaataagtattttcacaattttgataactgttaaaatctttaaaattcatatacatcattactttaaattgatttgtctttgcttcaaatagaacatcaaatacacatcttattaattgctgacttcttccatcataaagataagaatagaattgagatataccatcaaaaaaagatggaatttgaagtgattgagaagataaaggtatattattttcaacatagagtaattgttcaacattaatcatcaaagcatctgcaatatcatatagggtttcaatatctattgcaatttcacctttttcatatttagaaattgtcgatttacttttataaatttttagagcaagttcatccaacgttaaatttctcatttttctaaagatacgaatttttttaccaatctcttgatttatttgactcattaatattcacctcaagtttcttaaaaatagacaaataaatgaaaaaaataaatatttttttctttatcagaattttaccatagataacttaaaatatctatcctcaatcaacttatttcaaaaaaatctattcatatgaaacatatagctttttgacgagataaatatgtcttgataaaatagacttgtatacaaaagcagctgcatgaaataaggaggaaataaaaatgtacaactttgatgaaattattgatagaaagcataccaatgcaatgaatactgatggttttcgtgattatatattccatgctgatgaaagtatgaaatttccctataaagatgaagaattcattagaatgtgggtcgcagatatggaatttgcaacaccagatgtggttatagaaggaatcgaagaacgtttaaaaaaccgtatctttggatatactagagtcttttcaaatgattattatgatgcctttgtatcatggtgtcaaaaacgctatgattggagttttgaaaaaaaggaactcgttatgtcaaacggaattattcccgcactttatgaacttgtcaattatatatgcaaaaaggatgagaaagttttgtttttaacaccttcctatgcatatttcaaatatgctgcagatttcaatgaacgtgaaagtgtgtgcagtgatttaatcaatcaagatggttattatacaattgattatgaagattttgctaaaaaggcaagtgatcctcaaacaaaattatttattttatgtaatccacataatccaactggaagggtatggagagaagaagaattaatgaaaatagccaagattattgaagaaaatcagttgtgggttatttctgatgaaatccattgtgatttaattcgtacttgtcaaaaacatattccattagggaaagtgatgcctacatatcaaaagctaatcacatgtatggcacctacaaagacatttaatttagctggacttatgatttcaaatgttatcattagagatgaaaaattaagaaatatttggttaagtcgtcattataactttgataatcctttaagtattgcagctgcgcaaagtgcttatgctaagggagaagaatggttaaaggaattacaggtttatttagataataactttaagctcactcaagattatcttaaagagaatcttcctcaagctaaattccgtatttctgaggcaacatatttggcctgggttgatttgagtaactattttgaaccagacgaaaatttacctttattttttgcttatcgtgccggagtattattagaaggtggaaatatgtttgttcaaaattcagattgttttattcgtttaaatttagcttgtcctaaatctatattattagaaggactaaaaagaatttgtgaggctgttttgacaaaacataacgaaaaatatttaggggaaacaaaataatatataatcatcattttaaatacgttataataaataaaaagtataatgtaaagggatgataatatgtttttgaaagacatacttcaagacgaagcacaattttcacaaacggaatgtttaatcgcaaactatattttacaaagacaagaaaatattgtaaaagatagtgttcgtttcatcgcaaaagaaatctatgttgctccatcaacaattgttcatttttgtcaacagcttggctttagtggatttaatgactttaaaaaacaatacctagaggaattaaactatctttcttcgcattttcagcatattgatccaaattatccatttgaacgtaacgataaaaatacagtgatagctcaaaaaatagaagtcttatatgaagaaacactcaaagactgtatgtctcttattgaacatgattctttacaaaaatgtgtcaatatattattacaagctcaatatatttatatatgttcatcaggagctcaaagatcattaagtgatacttttaaagataagatgttaaagattggcaaacatgtctttatttttacgagtgaagatgacctttattatacaagctgttattgtgatataaaaaattcttgttttttatttgtatcatattcaggagaaacaagtcgctgtataagaattgctcaaaatgttaaagctagacatattccatgtttttgtataacttcctatggtaataatacattatctcatatggtccaagattgtctctatgtttcaacaagagaaaagatgacaaaaaatctaggttcatttagctttaatctatgtgttatgtatttgtttgatgttttatatgcaaatgtttttaatatgcattatgaaaagaatcttgaaaataagattaaatattctcgaatatatgaaaaaagagaacaactatcagggagaatatctcataatcctattttaaaagacgatgaatgaatcatattgaaagcaatgatataaggaggtatttatgaattatttaggaatagatattggtggaacatttatcaaatatgcattggttaatcaacaatttgaaattataaaaaaatggaaaaaagaaacaaaatattttccaacaagtgatgaattttatgactatgtatgtcaagatattgattgttatgaattatctctgattggtgtaagtgcaccaggagttatcagccacttgtcacaagtactaacagaaacttcaccacgaacaaagattatgtatcaaacatatattaatcaagaaataatgaaaagattaaaaataacaacctatgcgataaatgatgcaaaagcggctggtctttgcgaattgaaattaggcagtgctcagggaacaaaatcatcagcatttatgattataggaactgggattgggggttgcttatgtgatgaatttggagttattgatggtcatgattcaatagcaggagaattatcttgtttaccatttgatgtcgtcgatggaaagatcataagtgcatcacactttgcatcgatgagtgcacttatcgatatttataatcatctttcattatgtccagaaaaatatggaaagactatttgtgaaaagtatcttaaccatgatgccatcgcaatcaaagctatggataaatgggtgacacatatttgttttgttttaaatgttttgactctttgttataatccagaagtcatttgtattggtggtggaatttctgaagaagaatggtttattcaagtagttcaagataaatataatgaactctttccaaaacgttttcaacatgttttaacgactcaaatcaaacaatgtcaatatcataatgaagcaaatcttttaggcgccattttgtttgctttatcacaaaagcaaaggtttttttaagataaaaagaacattgtttttaaaatccatttcgtattttttaaaattaagaaacagtgttcaaaaacatttatattcacttgttttctatcataaaaagtatatgatggtatcatcgaaagaaggagagaataaatatggaaaagaaacctgtaaaaattgtaacaattggtggaggaagtagttatactccagaattaatggaaggatttatcaaaagatatgatgaacttccaatcagagaaatctggttagtagatattgaggacggaaaagaaaaaatggaaatcgttggggcaatggctcaacgtatgtgggatgcatctccatatgatgttaaagttcacttaactttagatcgtagagaagctttaaaagatgcagacttcgttacaactcaattcagagttgggctattaaatgctcgtatcaaagatgaaagaatcccattctcttatggaatgctaggacaagaaacaaatggtgctggaggaatcttcaaggcattcagaacaatcccagtaatcttaagtatcgtagaagatatgaaagaattatgtccaaatgcatggttaatcaacttcacaaatccaagtggaatggtaaccgaagcagtcatgaaatatggtaagtgggaaaaagtgattggattatgtaacgtacctgtaagtgccatgatgaaagaaccagaaacaattggaaagacattagatcaattaacttataagtttgctggattaaaccatttccactggcataaagtctatgatgaacatggaaatgaagttactcaagatatcattgatgcaatgtatgaaggaaaagatggaggattaccagctaatatcgctgatgtcccattcttcaaagaacaattagatacaatgaagatgattccatgtggatatcatagatactactatcgtcaacaagaaatgttggcacatggattggaagaattcaatgatccagaaaaaggaacacgtggacaacaagtaaaacaaacagaagcagaattgtttgaattatataaagatccaaacctagatcataaaccagaacaattggcaaaacgtggaggagcacattactcagatgcagcatgtgaaacaatcgcatcaatctattcaaatgccaatagacacatcgtcgttacaacaaagaataatggagcagtcccagatttaccagcagactgtgccgtagaagtttcagcatacattggagcaacaggggcaaaagccatagcctttggagaattgcaaccagcagaaaaaggatggttacaatgcatgaagaacatggaacactgcgtagaagaagcagcagttacaggagattatggaatggcattgcaagcatttatcttaaatccacaaattcctgctggagcaaatgcaaaacgtgtattagatgagttgttaatagcacataagaaatacttaccacaatttgctaaaaagattgcagaactagaagcagaaggtgttacaatcaaggatgatgtagcaagagaattaactgaaaaaggtttataa
